(19) United States
(12) Patent Application Publication
(10) Pub. No.: US 2025/0034578 A1
(43) Pub. Date: Jan. 30, 2025

(54) Subcutaneous Delivery of RNAi Agents for Inhibiting Expression of Receptor for Advanced Glycation End-products

(71) Applicant: Arrowhead Pharmaceuticals, Inc., Pasadena, CA (US)

(72) Inventors: James C. Hamilton, Sierra Madre, CA (US); Erik W. Bush, Verona, WI (US); David Itiro Kasahara, Madison, WI (US); Anthony Nicholas, Oregon, WI (US)

(21) Appl. No.: 18/894,620

(22) Filed: Sep. 24, 2024

Related U.S. Application Data
(63) Continuation of application No. PCT/US23/64778, filed on Mar. 21, 2023.
(60) Provisional application No. 63/484,557, filed on Feb. 13, 2023.
(60) Provisional application No. 63/322,609, filed on Mar. 22, 2022.

(51) Int. Cl. C12N 15/113

(52) U.S. Cl. CPC C12N 15/1138; C12N 2310/14; C12N 2310/315; C12N 2310/35; C12N 2320/32; C12N 2320/35

(57) ABSTRACT

Described are methods for subcutaneously administering a therapeutic composition comprising a RNAi agent for inhibiting Receptor for Advanced Glycation End-products (AGER or RAGE). The RAGE RNAi agents and RNAi agent conjugates disclosed herein inhibit the expression of an AGER gene when administered subcutaneously. Pharmaceutical compositions that include one or more RAGE RNAi agents, optionally with one or more additional therapeutics, are also described. Delivery of the described RAGE RNAi agents to pulmonary cells, in vivo, provides for inhibition of AGER gene expression and a reduction in membrane RAGE activity, which can provide a therapeutic benefit to subjects, including human subjects, for the treatment of various diseases including pulmonary inflammation diseases such as severe asthma. Subcutaneous delivery of the RAGE RNAi agents described herein can provide certain advantages over inhaled delivery.

### CROSS REFERENCE TO RELATED APPLICATIONS

[0001] This application is a continuation of PCT Application Number PCT/US23/64778, filed Mar. 21, 2023, which claims priority from U.S. Provisional Patent Application Ser. No. 63/322,609, filed on Mar. 22, 2022, and U.S. Provisional Patent Application Ser. No. 63/484,557, filed on Feb. 13, 2023, the contents of each of which are incorporated herein by reference in their entirety.

### FIELD OF THE INVENTION

[0002] The present disclosure relates to subcutaneous delivery of RNA interference (RNAi) agents, e.g., double stranded RNAi agents such as small (or short) interfering RNA, and compositions thereof, for inhibition of Receptor for Advanced Glycation End-products (RAGE or AGER) gene expression.

### SEQUENCE LISTING

[0003] This application contains a Sequence Listing which has been submitted in XML format and is hereby incorporated by reference in its entirety. The XML copy is named 30705-WO_ST26_SeqListing.xml, created Mar. 16, 2023, and is 3437 kb in size.

### BACKGROUND

[0004] The Receptor for Advanced Glycation End-products (“RAGE” or “AGER”) is a 35 kilodalton transmembrane protein of the immunoglobulin superfamily which functions as a pro-inflammatory pattern recognition receptor. In its full-length, membrane-bound form, the receptor has three functional domains: an extracellular ligand-binding domain, a hydrophobic transmembrane domain, and a cytoplasmic domain that mediates ligand-dependent signal transduction. A second, non-membrane bound soluble form of the receptor (sRAGE) contains only the extracellular ligand-binding domain; formed by proteolytic cleavage of full-length membrane-bound RAGE (or by alternative splicing), sRAGE antagonizes RAGE function since it binds ligands but lacks a cytoplasmic signaling domain.

[0005] RAGE is expressed at constitutively high levels in the lung, primarily localized to type 1 alveolar epithelial cells. Other tissues in the body normally express RAGE at low levels, but expression is upregulated in the presence of RAGE ligands and chronic inflammation. As a pattern recognition receptor, RAGE binds a wide variety of endogenous ligands, including advanced glycation end-products (sugar-modified proteins or lipids), high mobility group box 1 (HMGB1) and S100 proteins. Different intermediate signaling pathways can be activated by different RAGE ligands (e.g. ERK1/2, p38 and JAK/STAT) culminating in the production of reactive oxygen species, sustained activation of NF-κB and the transcription of pro-inflammatory genes (e.g. interleukins, interferon, TNF alpha). Transcription of the gene encoding RAGE itself is promoted by NF-κB, creating a positive feedback loop that perpetuates chronic inflammation.

[0006] RAGE has been linked to the chronic, pathological inflammation that contributes to many diseases, including: pulmonary disease (asthma, acute respiratory distress syndrome, idiopathic pulmonary fibrosis, chronic obstructive pulmonary disease, cystic fibrosis, lung cancer, bronchopulmonary dysplasia), cardiovascular disease (atherosclerosis, myocardial infarction, heart failure, peripheral vascular disease), cancer, diabetes, chronic kidney disease, neurodegenerative disease, rheumatoid arthritis, non-alcoholic steatohepatitis, injury caused by certain viral infections including SARS-CoV-2, certain ocular inflammatory conditions, and skeletal muscle wasting.

[0007] In the pulmonary disease space, RAGE knockout (KO) mice are completely protected, physiologically and histologically, from allergic asthma produced by challenge with house dust mite allergen or ovalbumin. Similarly, RAGE knockout mice are protected from hyperoxia or lipopolysaccharide-induced acute lung injury and inflammation. (See, e.g., Oczypok et al., Paediatr Respir Rev., 23: 40-49 (2017); Wang et al., Shock, 50: 472-482 (2018)). Genome-wide association studies (GWAS) have linked a variant gain-of-function RAGE allele (G82S) to increased inflammation, decreased pulmonary function, and risk of asthma (see, e.g., Hancock et al., Nat Genet., 42: 45-52 (2010); Repapi et al., Nat Genet., 42: 36-44 (2010)).

[0008] Despite its potential attractiveness as a drug target, development of potent and selective RAGE inhibitors has proven extremely challenging. Rather than binding to a discrete domain, a wide range of RAGE ligands interact with multiple binding sites within the antibody-like extracellular domain (see, e.g., Rojas et al., Current Drug Targets, 20: 340-346 (2019)). While certain RNAi agents capable of inhibiting the expression of a RAGE in vitro have been previously identified and reported in various studies, or are otherwise commercially available, the known RNAi agent constructs are neither sufficiently potent nor sufficiently specific to be viable as a therapeutic drug candidate. Thus, there remains a need for RAGE RNAi agents suitable for use as a therapeutic in the treatment of RAGE-associated diseases and disorders.

### SUMMARY

[0009] There continues to exist a need for novel RNA interference (RNAi) agents (termed RNAi agents, RNAi triggers, or triggers), e.g., double stranded RNAi agents such as small (or short) interfering RNA, that are able to selectively and efficiently inhibit the expression of a RAGE (AGER) gene, including for use as a therapeutic or medicament. Further, there exists a need for compositions of novel RAGE-specific RNAi agents for the treatment of diseases or disorders associated with pathological inflammation and/or disorders that can be mediated at least in part by a reduction in AGER gene expression and/or RAGE receptor levels. It is also be desirable to administer to patients compositions for inhibiting or knocking down RAGE receptor expression using subcutaneous delivery, which can provide patients with certain advantages over inhalation of drug products such as, for example, consistency of delivery particularly in patients that have airway blockage or congestion that may make delivery to type 1 alveolar cells more challenging, as well as potentially easier access to type 1 alveolar cells where RAGE gene expression can be found and potentially less frequent dosing as compared to inhalation and nebulization.

[0010] The nucleotide sequences and chemical modifications of the RAGE RNAi agents disclosed herein, as well as their combination with certain specific targeting ligands suitable for selectively and efficiently delivering the RAGE RNAi agents in vivo, differ from those previously disclosed or known in the art. As shown in, for example, the various Examples herein, the disclosed RAGE RNAi agents provide for highly potent and efficient inhibition of the expression of an AGER (RAGE) gene including by subcutaneous administration.

[0011] In general, the present disclosure features RAGE gene-specific RNAi agents, compositions that include RAGE RNAi agents, and methods for inhibiting expression of an AGER (RAGE) gene in vitro and/or in vivo using the RAGE RNAi agents and compositions that include RAGE RNAi agents described herein. The RAGE RNAi agents described herein are able to selectively and efficiently decrease or inhibit expression of an AGER gene, and thereby reduce the expression of the RAGE receptor and decrease activation of RAGE receptor signaling, including NF-κB, which ultimately results in reduced inflammation.

[0012] The described RAGE RNAi agents can be used in methods for therapeutic treatment (including preventative or prophylactic treatment) of symptoms and diseases including, but not limited to various pulmonary disease (asthma, acute respiratory distress syndrome, idiopathic pulmonary fibrosis, chronic obstructive pulmonary disease, cystic fibrosis, lung cancer, bronchopulmonary dysplasia), cardiovascular disease (atherosclerosis, myocardial infarction, heart failure, peripheral vascular disease), cancer, diabetes, chronic kidney disease, neurodegenerative disease, rheumatoid arthritis, non-alcoholic steatohepatitis, the inflammatory injury caused by certain viral infections including SARS-CoV-2, certain ocular inflammatory conditions, and skeletal muscle wasting.

[0013] In one aspect, the disclosure features RNAi agents for inhibiting expression of a RAGE (AGER) gene, wherein the RNAi agent includes a sense strand (also referred to as a passenger strand) and an antisense strand (also referred to as a guide strand). The sense strand and the antisense strand can be partially, substantially, or fully complementary to each other. The length of the RNAi agent sense strands described herein each can be 15 to 49 nucleotides in length. The length of the RNAi agent antisense strands described herein each can be 18 to 49 nucleotides in length. In some embodiments, the sense and antisense strands are independently 18 to 26 nucleotides in length. The sense and antisense strands can be either the same length or different lengths. In some embodiments, the sense and antisense strands are independently 21 to 26 nucleotides in length. In some embodiments, the sense and antisense strands are independently 21 to 24 nucleotides in length. In some embodiments, both the sense strand and the antisense strand are 21 nucleotides in length. In some embodiments, the antisense strands are independently 18, 19, 20, 21, 22, 23, 24, 25, 26, 27, 28, 29, or 30 nucleotides in length. In some embodiments, the sense strands are independently 15, 16, 17, 18, 19, 20, 21, 22, 23, 24, 25, 26, 27, 28, 29, 30, 31, 32, 33, 34, 35, 36, 37, 38, 39, 40, 41, 42, 43, 44, 45, 46, 47, 48, or 49 nucleotides in length. The RNAi agents described herein, upon delivery to a cell expressing RAGE such as a pulmonary cell (including, more specifically, type 1 alveolar epithelial cell), inhibit the expression of one or more AGER gene variants in vivo and/or in vitro.

[0014] The RAGE RNAi agents disclosed herein target a human AGER gene (see, e.g., SEQ ID NO:1). In some embodiments, the RAGE RNAi agents disclosed herein target a portion of an AGER gene having the sequence of any of the sequences disclosed in Table 1.

[0015] In another aspect, the disclosure features compositions, including pharmaceutical compositions, that include one or more of the disclosed RAGE RNAi agents that are able to selectively and efficiently decrease expression of an AGER gene. The compositions that include one or more RAGE RNAi agents described herein can be administered to a subject, such as a human or animal subject, for the treatment (including prophylactic treatment or inhibition) of symptoms and diseases associated with RAGE receptor activity.

[0016] Examples of RAGE RNAi agent sense strands and antisense strands that can be used in a RAGE RNAi agent are provided in Tables 3, 4, 5, and 6. Examples of RAGE RNAi agent duplexes are provided in Tables 7A, 7B, 8, 9A, 9B, and 10. Examples of 19-nucleotide core stretch sequences that may consist of or may be included in the sense strands and antisense strands of certain RAGE RNAi agents disclosed herein, are provided in Table 2.

[0017] In another aspect, the disclosure features methods for delivering RAGE RNAi agents to pulmonary epithelial cells in a subject, such as a mammal, in vivo. Also described herein are compositions for use in such methods. In some embodiments, disclosed herein are methods for delivering RAGE RNAi agents to pulmonary cells (including epithelial cells, macrophages, smooth muscle, endothelial cells, and preferably type 1 alveolar epithelial cells) to a subject in vivo. In some embodiments, the subject is a human subject.

[0018] The methods disclosed herein include the administration of one or more RAGE RNAi agents to a subject, e.g., a human or animal subject, by any suitable means known in the art. The pharmaceutical compositions disclosed herein that include one or more RAGE RNAi agents can be administered in a number of ways depending upon whether local or systemic treatment is desired. Administration can be, but is not limited to, for example, intravenous, intraarterial, subcutaneous, intraperitoneal, subdermal (e.g., via an implanted device), and intraparenchymal administration. In some embodiments, the pharmaceutical compositions described herein are administered by inhalation (such as dry powder inhalation or aerosol inhalation), intranasal administration, intratracheal administration, or oropharyngeal aspiration administration.

[0019] In some embodiments, it is desired that the RAGE RNAi agents described herein inhibit the expression of an AGER gene in the pulmonary epithelium, for which the administration is by inhalation (e.g., by an inhaler device, such as a metered-dose inhaler, or a nebulizer such as a jet or vibrating mesh nebulizer, or a soft mist inhaler).

[0020] The one or more RAGE RNAi agents can be delivered to target cells or tissues using any oligonucleotide delivery technology known in the art. In some embodiments, a RAGE RNAi agent is delivered to cells or tissues by covalently linking the RNAi agent to a targeting group. In some embodiments, the targeting group can include a cell receptor ligand, such as an integrin targeting ligand. Integrins are a family of transmembrane receptors that facilitate cell-extracellular matrix (ECM) adhesion. In particular, integrin alpha-v-beta-6 (αvβ6) is an epithelial-specific integrin that is known to be a receptor for ECM proteins and the TGF-beta latency-associated peptide (LAP), and is expressed in various cells and tissues. Integrin αvβ6 is known to be highly upregulated in injured pulmonary epithelium. In some embodiments, the RAGE RNAi agents described herein are linked to an integrin targeting ligand that has affinity for integrin αvβ6. As referred to herein, an “αvβ6 integrin targeting ligand” is a compound that has affinity for integrin αvβ6, which can be utilized as a ligand to facilitate the targeting and delivery of an RNAi agent to which it is attached to the desired cells and/or tissues (i.e., to cells expressing integrin αvβ6). In some embodiments, multiple αvβ6 integrin targeting ligands or clusters of αvβ6 integrin targeting ligands are linked to a RAGE RNAi agent. In some embodiments, the RAGE RNAi agent-αvβ6 integrin targeting ligand conjugates are selectively internalized by lung epithelial cells, either through receptor-mediated endocytosis or by other means.

[0021] Examples of targeting groups useful for delivering RAGE RNAi agents that include αvβ6 integrin targeting ligands are disclosed, for example, in International Patent Application Publication No. WO 2018/085415 and International Patent Application Publication No. WO 2019/089765, the contents of each of which are incorporated by reference herein in their entirety.

[0022] A targeting group can be linked to the 3′ or 5′ end of a sense strand or an antisense strand of a RAGE RNAi agent. In some embodiments, a targeting group is linked to the 3′ or 5′ end of the sense strand. In some embodiments, a targeting group is linked to the 5′ end of the sense strand. In some embodiments, a targeting group is linked internally to a nucleotide on the sense strand and/or the antisense strand of the RNAi agent. In some embodiments, a targeting group is linked to the RNAi agent via a linker.

[0023] In another aspect, the disclosure features compositions that include one or more RAGE RNAi agents that have the duplex structures disclosed in Tables 7A, 7B, 8, 9A, 9B, and 10.

[0024] The use of RAGE RNAi agents provides methods for therapeutic (including prophylactic) treatment of diseases or disorders for which a reduction in RAGE receptor activity can provide a therapeutic benefit. The RAGE RNAi agents disclosed herein can be used to treat various respiratory diseases, including pulmonary disease (asthma, acute respiratory distress syndrome, idiopathic pulmonary fibrosis, chronic obstructive pulmonary disease, cystic fibrosis, lung cancer, bronchopulmonary dysplasia), cardiovascular disease (atherosclerosis, myocardial infarction, heart failure, peripheral vascular disease), cancer, diabetes, chronic kidney disease, neurodegenerative disease, rheumatoid arthritis, non-alcoholic steatohepatitis, injury caused by certain viral infections including SARS-CoV-2, certain ocular inflammatory conditions, and skeletal muscle wasting. In some embodiments, the RAGE RNAi agents disclosed herein can be used to treat a pulmonary inflammatory disease or condition. RAGE RNAi agents can further be used to treat, for example, various ocular inflammatory diseases and disorders. Such methods of treatment include administration of a RAGE RNAi agent to a human being or animal having elevated or enhanced RAGE receptor levels or RAGE receptor activity beyond desirable levels.

[0025] As used herein, the terms “oligonucleotide” and “polynucleotide” mean a polymer of linked nucleosides each of which can be independently modified or unmodified.

[0026] As used herein, an “RNAi agent” (also referred to as an “RNAi trigger”) means a composition that contains an RNA or RNA-like (e.g., chemically modified RNA) oligonucleotide molecule that is capable of degrading or inhibiting (e.g., degrades or inhibits under appropriate conditions) translation of messenger RNA (mRNA) transcripts of a target gene in a sequence specific manner. As used herein, RNAi agents may operate through the RNA interference mechanism (i.e., inducing RNA interference through interaction with the RNA interference pathway machinery (RNA-induced silencing complex or RISC) of mammalian cells), or by any alternative mechanism(s) or pathway(s). While it is believed that RNAi agents, as that term is used herein, operate primarily through the RNA interference mechanism, the disclosed RNAi agents are not bound by or limited to any particular pathway or mechanism of action. RNAi agents disclosed herein are comprised of a sense strand and an antisense strand, and include, but are not limited to: short (or small) interfering RNAs (siRNAs), double stranded RNAs (dsRNA), micro RNAs (miRNAs), short hairpin RNAs (shRNA), and dicer substrates. The antisense strand of the RNAi agents described herein is at least partially complementary to the mRNA being targeted (i.e., AGER mRNA). RNAi agents can include one or more modified nucleotides and/or one or more non-phosphodiester linkages.

[0027] As used herein, the terms “silence,” “reduce,” “inhibit,” “down-regulate,” or “knockdown” when referring to expression of a given gene, mean that the expression of the gene, as measured by the level of RNA transcribed from the gene or the level of polypeptide, protein, or protein subunit translated from the mRNA in a cell, group of cells, tissue, organ, or subject in which the gene is transcribed, is reduced when the cell, group of cells, tissue, organ, or subject is treated with the RNAi agents described herein as compared to a second cell, group of cells, tissue, organ, or subject that has not or have not been so treated.

[0028] As used herein, the terms “sequence” and “nucleotide sequence” mean a succession or order of nucleobases or nucleotides, described with a succession of letters using standard nomenclature.

[0029] As used herein, a “base,” “nucleotide base,” or “nucleobase,” is a heterocyclic pyrimidine or purine compound that is a component of a nucleotide, and includes the primary purine bases adenine and guanine, and the primary pyrimidine bases cytosine, thymine, and uracil. A nucleobase may further be modified to include, without limitation, universal bases, hydrophobic bases, promiscuous bases, size-expanded bases, and fluorinated bases. (See, e.g., Modified Nucleosides in Biochemistry, Biotechnology and Medicine, Herdewijn, P. ed. Wiley-VCH, 2008). The synthesis of such modified nucleobases (including phosphoramidite compounds that include modified nucleobases) is known in the art.

[0030] As used herein, and unless otherwise indicated, the term “complementary,” when used to describe a first nucleobase or nucleotide sequence (e.g., RNAi agent sense strand or targeted mRNA) in relation to a second nucleobase or nucleotide sequence (e.g., RNAi agent antisense strand or a single-stranded antisense oligonucleotide), means the ability of an oligonucleotide or polynucleotide including the first nucleotide sequence to hybridize (form base pair hydrogen bonds under mammalian physiological conditions (or otherwise suitable in vivo or in vitro conditions)) and form a duplex or double helical structure under certain standard conditions with an oligonucleotide that includes the second nucleotide sequence. The person of ordinary skill in the art would be able to select the set of conditions most appropriate for a hybridization test. Complementary sequences include Watson-Crick base pairs or non-Watson-Crick base pairs and include natural or modified nucleotides or nucleotide mimics, at least to the extent that the above hybridization requirements are fulfilled. Sequence identity or complementarity is independent of modification. For example, a and Af, as defined herein, are complementary to U (or T) and identical to A for the purposes of determining identity or complementarity.

[0031] As used herein, “perfectly complementary” or “fully complementary” means that in a hybridized pair of nucleobase or nucleotide sequence molecules, all (100%) of the bases in a contiguous sequence of a first oligonucleotide will hybridize with the same number of bases in a contiguous sequence of a second oligonucleotide. The contiguous sequence may comprise all or a part of a first or second nucleotide sequence.

[0032] As used herein, “partially complementary” means that in a hybridized pair of nucleobase or nucleotide sequence molecules, at least 70%, but not all, of the bases in a contiguous sequence of a first oligonucleotide will hybridize with the same number of bases in a contiguous sequence of a second oligonucleotide. The contiguous sequence may comprise all or a part of a first or second nucleotide sequence.

[0033] As used herein, “substantially complementary” means that in a hybridized pair of nucleobase or nucleotide sequence molecules, at least 85%, but not all, of the bases in a contiguous sequence of a first oligonucleotide will hybridize with the same number of bases in a contiguous sequence of a second oligonucleotide. The contiguous sequence may comprise all or a part of a first or second nucleotide sequence.

[0034] As used herein, the terms “complementary,” “fully complementary,” “partially complementary,” and “substantially complementary” are used with respect to the nucleobase or nucleotide matching between the sense strand and the antisense strand of an RNAi agent, or between the antisense strand of an RNAi agent and a sequence of an AGER mRNA.

[0035] As used herein, the term “substantially identical” or “substantial identity,” as applied to a nucleic acid sequence means the nucleotide sequence (or a portion of a nucleotide sequence) has at least about 85% sequence identity or more, e.g., at least 90%, at least 95%, or at least 99% identity, compared to a reference sequence. Percentage of sequence identity is determined by comparing two optimally aligned sequences over a comparison window. The percentage is calculated by determining the number of positions at which the same type of nucleic acid base occurs in both sequences to yield the number of matched positions, dividing the number of matched positions by the total number of positions in the window of comparison and multiplying the result by 100 to yield the percentage of sequence identity. The inventions disclosed herein encompass nucleotide sequences substantially identical to those disclosed herein.

[0036] As used herein, the terms “treat,” “treatment,” and the like, mean the methods or steps taken to provide relief from or alleviation of the number, severity, and/or frequency of one or more symptoms of a disease in a subject. As used herein, “treat” and “treatment” may include the prevention, management, prophylactic treatment, and/or inhibition or reduction of the number, severity, and/or frequency of one or more symptoms of a disease in a subject.

[0037] As used herein, the phrase “introducing into a cell,” when referring to an RNAi agent, means functionally delivering the RNAi agent into a cell. The phrase “functional delivery,” means delivering the RNAi agent to the cell in a manner that enables the RNAi agent to have the expected biological activity, e.g., sequence-specific inhibition of gene expression.

[0038] Unless stated otherwise, use of the symbol

[chemical structure]

as used herein means that any group or groups may be linked thereto that is in accordance with the scope of the inventions described herein.

[0039] As used herein, the term “isomers” refers to compounds that have identical molecular formulae, but that differ in the nature or the sequence of bonding of their atoms or in the arrangement of their atoms in space. Isomers that differ in the arrangement of their atoms in space are termed “stereoisomers.” Stereoisomers that are not mirror images of one another are termed “diastereoisomers,” and stereoisomers that are non-superimposable mirror images are termed “enantiomers,” or sometimes optical isomers. A carbon atom bonded to four non-identical substituents is termed a “chiral center.”

[0040] As used herein, unless specifically identified in a structure as having a particular conformation, for each structure in which asymmetric centers are present and thus give rise to enantiomers, diastereomers, or other stereoisomeric configurations, each structure disclosed herein is intended to represent all such possible isomers, including their optically pure and racemic forms. For example, the structures disclosed herein are intended to cover mixtures of diastereomers as well as single stereoisomers.

[0041] As used in a claim herein, the phrase “consisting of” excludes any element, step, or ingredient not specified in the claim. When used in a claim herein, the phrase “consisting essentially of” limits the scope of a claim to the specified materials or steps and those that do not materially affect the basic and novel characteristic(s) of the claimed invention.

[0042] The person of ordinary skill in the art would readily understand and appreciate that the compounds and compositions disclosed herein may have certain atoms (e.g., N, O, or S atoms) in a protonated or deprotonated state, depending upon the environment in which the compound or composition is placed. Accordingly, as used herein, the structures disclosed herein envisage that certain functional groups, such as, for example, OH, SH, or NH, may be protonated or deprotonated. The disclosure herein is intended to cover the disclosed compounds and compositions regardless of their state of protonation based on the environment (such as pH), as would be readily understood by the person of ordinary skill in the art. Correspondingly, compounds described herein with labile protons or basic atoms should also be understood to represent salt forms of the corresponding compound. Compounds described herein may be in a free acid, free base, or salt form. Pharmaceutically acceptable salts of the compounds described herein should be understood to be within the scope of the invention.

[0043] As used herein, the term “linked” or “conjugated” when referring to the connection between two compounds or molecules means that two compounds or molecules are joined by a covalent bond. Unless stated, the terms “linked” and “conjugated” as used herein may refer to the connection between a first compound and a second compound either with or without any intervening atoms or groups of atoms.

[0044] As used herein, the term “including” is used to herein mean, and is used interchangeably with, the phrase “including but not limited to.” The term “or” is used herein to mean, and is used interchangeably with, the term “and/or,” unless the context clearly indicates otherwise.

[0045] Unless otherwise defined, all technical and scientific terms used herein have the same meaning as commonly understood by one of ordinary skill in the art. Although methods and materials similar or equivalent to those described herein can be used in the practice or testing of the present invention, suitable methods and materials are described below. All publications, patent applications, patents, and other references mentioned herein are incorporated by reference in their entirety. In case of conflict, the present specification, including definitions, will control. In addition, the materials, methods, and examples are illustrative only and not intended to be limiting.

[0046] Other objects, features, aspects, and advantages of the invention will be apparent from the following detailed description, accompanying figures, and from the claims.

### BRIEF DESCRIPTION OF THE DRAWINGS

[0047] FIG. 1. Chemical structure representation of the tridentate αvβ6 epithelial cell targeting ligand referred to herein as Tri-SM6.1-αvβ6-(TA14).

[0048] FIG. 2. Chemical structure representation of the peptide αvβ6 epithelial cell targeting ligand referred to herein as αvβ6-pep1.

[0049] FIG. 3A to 3E. Chemical structure representation of RAGE RNAi agent conjugate AC000292 shown as a free acid.

[0050] FIG. 4A to 4E. Chemical structure representation of RAGE RNAi agent conjugate AC000292 shown as a sodium salt.

[0051] FIG. 5A to 5E. Chemical structure representation of RAGE RNAi agent conjugate AC0001266 shown as a free acid.

[0052] FIG. 6A to 6E. Chemical structure representation of RAGE RNAi agent conjugate AC0001266 shown as a sodium salt.

[0053] FIG. 7A to 7E. Chemical structure representation of RAGE RNAi agent conjugate AC0001267 shown as a free acid.

[0054] FIG. 8A to 8E. Chemical structure representation of RAGE RNAi agent conjugate AC0001267 shown as a sodium salt.

[0055] FIG. 9A to 9E. Chemical structure representation of RAGE RNAi agent conjugate AC0001268 shown as a free acid.

[0056] FIG. 10A to 10E. Chemical structure representation of RAGE RNAi agent conjugate AC0001268 shown as a sodium salt.

[0057] FIG. 11. Soluble RAGE (sRAGE) levels over time after SQ delivery of RAGE RNAi agent in rats, single SQ dose of RAGE RNAi agent (Groups 2 and 3), Example 3.

[0058] FIG. 12. Soluble RAGE (sRAGE) levels over time after SQ delivery of RAGE RNAi agent in rats, dosed with RAGE RNAi agent every 4 weeks (monthly) (Groups 4, 5, and 6), Example 3.

[0059] FIG. 13. Soluble RAGE (sRAGE) levels over time after SQ delivery of RAGE RNAi agent in rats, dosed with RAGE RNAi agent every 2 weeks (Groups 7, 8, 9, and 10), Example 3.

[0060] FIG. 14. Soluble RAGE (sRAGE) levels over time after SQ delivery of RAGE RNAi agent in rats, dosed with RAGE RNAi agent every 2 weeks (Groups 7 and 8), Example 3. This shows only the recovery period.

[0061] FIG. 15. Soluble RAGE (sRAGE) levels over time after SQ delivery of RAGE RNAi agent in rats, dosed with RAGE RNAi agent every week (Groups 11, 12, 13, and 14), Example 3.

[0062] FIG. 16. Soluble RAGE (sRAGE) levels over time after SQ delivery of RAGE RNAi agent in rats, dosed with RAGE RNAi agent every week (Groups 11, 12, and 13), Example 3. This shows only the recovery period.

[0063] FIG. 17. Rat RAGE mRNA levels at Day 22 post RAGE after RNAi agent subcutaneous administration according to the procedure of Example 4.

### DETAILED DESCRIPTION

### RNAi Agents

[0064] Described herein are RNAi agents for inhibiting expression of the AGER (or RAGE) gene (referred to herein as RAGE RNAi agents or RAGE RNAi triggers). Each RAGE RNAi agent disclosed herein comprises a sense strand and an antisense strand. The length of the RNAi agent sense strands described herein each can be 15 to 49 nucleotides in length. The length of the RNAi agent antisense strands described herein each can be 18 to 49 nucleotides in length. In some embodiments, the sense and antisense strands are independently 18 to 26 nucleotides in length. The sense and antisense strands can be either the same length or different lengths. In some embodiments, the sense and antisense strands are independently 21 to 26 nucleotides in length. In some embodiments, the sense and antisense strands are independently 21 to 24 nucleotides in length. In some embodiments, both the sense strand and the antisense strand are 21 nucleotides in length. In some embodiments, the antisense strands are independently 18, 19, 20, 21, 22, 23, 24, 25, 26, 27, 28, 29, or 30 nucleotides in length. In some embodiments, the sense strands are independently 15, 16, 17, 18, 19, 20, 21, 22, 23, 24, 25, 26, 27, 28, 29, 30, 31, 32, 33, 34, 35, 36, 37, 38, 39, 40, 41, 42, 43, 44, 45, 46, 47, 48, or 49 nucleotides in length. In some embodiments, a double-stranded RNAi agent has a duplex length of about 16, 17, 18, 19, 20, 21, 22, 23 or 24 nucleotides.

[0065] Examples of nucleotide sequences used in forming RAGE RNAi agents are provided in Tables 2, 3, 4, 5, 6, and 10. Examples of RNAi agent duplexes, that include the sense strand and antisense strand sequences in Tables 2, 3, 4, 5, 6, are shown in Tables 7A, 7B, 8, 9A, 9B, and 10.

[0066] In some embodiments, the region of perfect, substantial, or partial complementarity between the sense strand and the antisense strand is 15-26 (e.g., 15, 16, 17, 18, 19, 20, 21, 22, 23, 24, 25, or 26) nucleotides in length and occurs at or near the 5′ end of the antisense strand (e.g., this region may be separated from the 5′ end of the antisense strand by 0, 1, 2, 3, or 4 nucleotides that are not perfectly, substantially, or partially complementary).

[0067] A sense strand of the RAGE RNAi agents described herein includes at least 15 consecutive nucleotides that have at least 85% identity to a core stretch sequence (also referred to herein as a “core stretch” or “core sequence”) of the same number of nucleotides in an AGER mRNA. In some embodiments, a sense strand core stretch sequence is 100% (perfectly) complementary or at least about 85% (substantially) complementary to a core stretch sequence in the antisense strand, and thus the sense strand core stretch sequence is typically perfectly identical or at least about 85% identical to a nucleotide sequence of the same length (sometimes referred to, e.g., as a target sequence) present in the AGER mRNA target. In some embodiments, this sense strand core stretch is 15, 16, 17, 18, 19, 20, 21, 22, or 23 nucleotides in length. In some embodiments, this sense strand core stretch is 17 nucleotides in length. In some embodiments, this sense strand core stretch is 19 nucleotides in length.

[0068] An antisense strand of a RAGE RNAi agent described herein includes at least 15 consecutive nucleotides that have at least 85% complementarity to a core stretch of the same number of nucleotides in an AGER mRNA and to a core stretch of the same number of nucleotides in the corresponding sense strand. In some embodiments, an antisense strand core stretch is 100% (perfectly) complementary or at least about 85% (substantially) complementary to a nucleotide sequence (e.g., target sequence) of the same length present in the AGER mRNA target. In some embodiments, this antisense strand core stretch is 15, 16, 17, 18, 19, 20, 21, 22, 23, 24, 25, or 26 nucleotides in length. In some embodiments, this antisense strand core stretch is 19 nucleotides in length. In some embodiments, this antisense strand core stretch is 17 nucleotides in length. A sense strand core stretch sequence can be the same length as a corresponding antisense core sequence or it can be a different length.

[0069] The RAGE RNAi agent sense and antisense strands anneal to form a duplex. A sense strand and an antisense strand of a RAGE RNAi agent can be partially, substantially, or fully complementary to each other. Within the complementary duplex region, the sense strand core stretch sequence is at least 85% complementary or 100% complementary to the antisense core stretch sequence. In some embodiments, the sense strand core stretch sequence contains a sequence of at least 15, at least 16, at least 17, at least 18, at least 19, at least 20, at least 21, at least 22, or at least 23 nucleotides that is at least 85% or 100% complementary to a corresponding 15, 16, 17, 18, 19, 20, 21, 22, or 23 nucleotide sequence of the antisense strand core stretch sequence (i.e., the sense and antisense core stretch sequences of a RAGE RNAi agent have a region of at least 15, at least 16, at least 17, at least 18, at least 19, at least 20, at least 21, at least 22, or at least 23 nucleotides that is at least 85% base paired or 100% base paired.)

[0070] In some embodiments, the antisense strand of a RAGE RNAi agent disclosed herein differs by 0, 1, 2, or 3 nucleotides from any of the antisense strand sequences in Table 2 or Table 3. In some embodiments, the sense strand of a RAGE RNAi agent disclosed herein differs by 0, 1, 2, or 3 nucleotides from any of the sense strand sequences in Table 2, Table 4, Table 5, Table 6, or Table 10.

[0071] In some embodiments, the sense strand and/or the antisense strand can optionally and independently contain an additional 1, 2, 3, 4, 5, or 6 nucleotides (extension) at the 3′ end, the 5′ end, or both the 3′ and 5′ ends of the core stretch sequences. The antisense strand additional nucleotides, if present, may or may not be complementary to the corresponding sequence in the AGER mRNA. The sense strand additional nucleotides, if present, may or may not be identical to the corresponding sequence in the AGER mRNA. The antisense strand additional nucleotides, if present, may or may not be complementary to the corresponding sense strand's additional nucleotides, if present.

[0072] As used herein, an extension comprises 1, 2, 3, 4, 5, or 6 nucleotides at the 5′ and/or 3′ end of the sense strand core stretch sequence and/or antisense strand core stretch sequence. The extension nucleotides on a sense strand may or may not be complementary to nucleotides, either core stretch sequence nucleotides or extension nucleotides, in the corresponding antisense strand. Conversely, the extension nucleotides on an antisense strand may or may not be complementary to nucleotides, either core stretch nucleotides or extension nucleotides, in the corresponding sense strand. In some embodiments, both the sense strand and the antisense strand of an RNAi agent contain 3′ and 5′ extensions. In some embodiments, one or more of the 3′ extension nucleotides of one strand base pairs with one or more 5′ extension nucleotides of the other strand. In other embodiments, one or more of 3′ extension nucleotides of one strand do not base pair with one or more 5′ extension nucleotides of the other strand. In some embodiments, a RAGE RNAi agent has an antisense strand having a 3′ extension and a sense strand having a 5′ extension. In some embodiments, the extension nucleotide(s) are unpaired and form an overhang. As used herein, an “overhang” refers to a stretch of one or more unpaired nucleotides located at a terminal end of either the sense strand or the antisense strand that does not form part of the hybridized or duplexed portion of an RNAi agent disclosed herein.

[0073] In some embodiments, a RAGE RNAi agent comprises an antisense strand having a 3′ extension of 1, 2, 3, 4, 5, or 6 nucleotides in length. In other embodiments, a RAGE RNAi agent comprises an antisense strand having a 3′ extension of 1, 2, or 3 nucleotides in length. In some embodiments, one or more of the antisense strand extension nucleotides comprise nucleotides that are complementary to the corresponding AGER mRNA sequence. In some embodiments, one or more of the antisense strand extension nucleotides comprise nucleotides that are not complementary to the corresponding AGER mRNA sequence.

[0074] In some embodiments, a RAGE RNAi agent comprises a sense strand having a 3′ extension of 1, 2, 3, 4, or 5 nucleotides in length. In some embodiments, one or more of the sense strand extension nucleotides comprises adenosine, uracil, or thymidine nucleotides, AT dinucleotide, or nucleotides that correspond to or are the identical to nucleotides in the AGER mRNA sequence. In some embodiments, the 3′ sense strand extension includes or consists of one of the following sequences, but is not limited to: T, UT, TT, UU, UUT, TTT, or TTTT (each listed 5′ to 3′).

[0075] A sense strand can have a 3′ extension and/or a 5′ extension. In some embodiments, a RAGE RNAi agent comprises a sense strand having a 5′ extension of 1, 2, 3, 4, 5, or 6 nucleotides in length. In some embodiments, one or more of the sense strand extension nucleotides comprise nucleotides that correspond to or are identical to nucleotides in the AGER mRNA sequence.

[0076] Examples of sequences used in forming RAGE RNAi agents are provided in Tables 2, 3, 4, 5, 6, and 10. In some embodiments, a RAGE RNAi agent antisense strand includes a sequence of any of the sequences in Tables 2, 3, or 10. In certain embodiments, a RAGE RNAi agent antisense strand comprises or consists of any one of the modified sequences in Table 3. In some embodiments, a RAGE RNAi agent antisense strand includes the sequence of nucleotides (from 5′ end→3′ end) 1-17, 2-15, 2-17, 1-18, 2-18, 1-19, 2-19, 1-20, 2-20, 1-21, or 2-21, of any of the sequences in Tables 2 or 3. In some embodiments, a RAGE RNAi agent sense strand includes the sequence of any of the sequences in Tables 2, 4, 5, or 6. In some embodiments, a RAGE RNAi agent sense strand includes the sequence of nucleotides (from 5′ end→3′ end) 1-18, 1-19, 1-20, 1-21, 2-19, 2-20, 2-21, 3-20, 3-21, or 4-21 of any of the sequences in Tables 2, 4, 5, or 6. In certain embodiments, a RAGE RNAi agent sense strand comprises or consists of a modified sequence of any one of the modified sequences in Table 4, 5, 6, or 10.

[0077] In some embodiments, the sense and antisense strands of the RNAi agents described herein contain the same number of nucleotides. In some embodiments, the sense and antisense strands of the RNAi agents described herein contain different numbers of nucleotides. In some embodiments, the sense strand 5′ end and the antisense strand 3′ end of an RNAi agent form a blunt end. In some embodiments, the sense strand 3′ end and the antisense strand 5′ end of an RNAi agent form a blunt end. In some embodiments, both ends of an RNAi agent form blunt ends. In some embodiments, neither end of an RNAi agent is blunt-ended. As used herein a “blunt end” refers to an end of a double stranded RNAi agent in which the terminal nucleotides of the two annealed strands are complementary (form a complementary base-pair).

[0078] In some embodiments, the sense strand 5′ end and the antisense strand 3′ end of an RNAi agent form a frayed end. In some embodiments, the sense strand 3′ end and the antisense strand 5′ end of an RNAi agent form a frayed end. In some embodiments, both ends of an RNAi agent form a frayed end. In some embodiments, neither end of an RNAi agent is a frayed end. As used herein a frayed end refers to an end of a double stranded RNAi agent in which the terminal nucleotides of the two annealed strands form a pair (i.e., do not form an overhang) but are not complementary (i.e. form a non-complementary pair). In some embodiments, one or more unpaired nucleotides at the end of one strand of a double stranded RNAi agent form an overhang. The unpaired nucleotides may be on the sense strand or the antisense strand, creating either 3′ or 5′ overhangs. In some embodiments, the RNAi agent contains: a blunt end and a frayed end, a blunt end and 5′ overhang end, a blunt end and a 3′ overhang end, a frayed end and a 5′ overhang end, a frayed end and a 3′ overhang end, two 5′ overhang ends, two 3′ overhang ends, a 5′ overhang end and a 3′ overhang end, two frayed ends, or two blunt ends. Typically, when present, overhangs are located at the 3′ terminal ends of the sense strand, the antisense strand, or both the sense strand and the antisense strand.

[0079] The RAGE RNAi agents disclosed herein may also be comprised of one or more modified nucleotides. In some embodiments, substantially all of the nucleotides of the sense strand and substantially all of the nucleotides of the antisense strand of the RAGE RNAi agent are modified nucleotides. The RAGE RNAi agents disclosed herein may further be comprised of one or more modified internucleoside linkages, e.g., one or more phosphorothioate linkages. In some embodiments, a RAGE RNAi agent contains one or more modified nucleotides and one or more modified internucleoside linkages. In some embodiments, a 2′-modified nucleotide is combined with modified internucleoside linkage.

[0080] In some embodiments, a RAGE RNAi agent is prepared or provided as a salt, mixed salt, or a free-acid. In some embodiments, a RAGE RNAi agent is prepared as a pharmaceutically acceptable salt. In some embodiments, a RAGE RNAi agent is prepared as a pharmaceutically acceptable sodium salt. Such forms that are well known in the art are within the scope of the inventions disclosed herein.

### Modified Nucleotides

[0081] Modified nucleotides, when used in various oligonucleotide constructs, can preserve activity of the compound in cells while at the same time increasing the serum stability of these compounds, and can also minimize the possibility of activating interferon activity in humans upon administration of the oligonucleotide construct.

[0082] In some embodiments, a RAGE RNAi agent contains one or more modified nucleotides. As used herein, a “modified nucleotide” is a nucleotide other than a ribonucleotide (2′-hydroxyl nucleotide). In some embodiments, at least 50% (e.g., at least 60%, at least 70%, at least 80%, at least 90%, at least 95%, at least 97%, at least 98%, at least 99%, or 100%) of the nucleotides are modified nucleotides. As used herein, modified nucleotides can include, but are not limited to, deoxyribonucleotides, nucleotide mimics, abasic nucleotides, 2′-modified nucleotides, inverted nucleotides, modified nucleobase-comprising nucleotides, bridged nucleotides, peptide nucleic acids (PNAs), 2′,3′-seco nucleotide mimics (unlocked nucleobase analogues), locked nucleotides, 3′-O-methoxy (2′ internucleoside linked) nucleotides, 2′-F-Arabino nucleotides, 5′-Me, 2′-fluoro nucleotide, morpholino nucleotides, vinyl phosphonate deoxyribonucleotides, vinyl phosphonate containing nucleotides, and cyclopropyl phosphonate containing nucleotides. 2′-modified nucleotides (i.e., a nucleotide with a group other than a hydroxyl group at the 2′ position of the five-membered sugar ring) include, but are not limited to, 2′-O-methyl nucleotides (also referred to as 2′-methoxy nucleotides), 2′-fluoro nucleotides (also referred to herein and in the art as 2′-deoxy-2′-fluoro nucleotides), 2′-deoxy nucleotides, 2′-methoxyethyl (2′-O-2-methoxylethyl) nucleotides (also referred to as 2′-MOE), 2′-amino nucleotides, and 2′-alkyl nucleotides. It is not necessary for all positions in a given compound to be uniformly modified. Conversely, more than one modification can be incorporated in a single RAGE RNAi agent or even in a single nucleotide thereof. The RAGE RNAi agent sense strands and antisense strands can be synthesized and/or modified by methods known in the art. Modification at one nucleotide is independent of modification at another nucleotide.

[0083] Modified nucleobases include synthetic and natural nucleobases, such as 5-substituted pyrimidines, 6-azapyrimidines and N-2, N-6 and 0-6 substituted purines, (e.g., 2-aminopropyladenine, 5-propynyluracil, or 5-propynylcytosine), 5-methylcytosine (5-me-C), 5-hydroxymethyl cytosine, inosine, xanthine, hypoxanthine, 2-aminoadenine, 6-alkyl (e.g., 6-methyl, 6-ethyl, 6-isopropyl, or 6-n-butyl) derivatives of adenine and guanine, 2-alkyl (e.g., 2-methyl, 2-ethyl, 2-isopropyl, or 2-n-butyl) and other alkyl derivatives of adenine and guanine, 2-thiouracil, 2-thiothymine, 2-thiocytosine, 5-halouracil, cytosine, 5-propynyl uracil, 5-propynyl cytosine, 6-azo uracil, 6-azo cytosine, 6-azo thymine, 5-uracil (pseudouracil), 4-thiouracil, 8-halo, 8-amino, 8-sulfhydryl, 8-thioalkyl, 8-hydroxyl and other 8-substituted adenines and guanines, 5-halo (e.g., 5-bromo), 5-trifluoromethyl, and other 5-substituted uracils and cytosines, 7-methylguanine and 7-methyladenine, 8-azaguanine and 8-azaadenine, 7-deazaguanine, 7-deazaadenine, 3-deazaguanine, and 3-deazaadenine.

[0084] In some embodiments, the 5′ and/or 3′ end of the antisense strand can include abasic residues (Ab), which can also be referred to as an “abasic site” or “abasic nucleotide.” An abasic residue (Ab) is a nucleotide or nucleoside that lacks a nucleobase at the 1′ position of the sugar moiety. (See, e.g., U.S. Pat. No. 5,998,203). In some embodiments, an abasic residue can be placed internally in a nucleotide sequence. In some embodiments, Ab or AbAb can be added to the 3′ end of the antisense strand. In some embodiments, the 5′ end of the sense strand can include one or more additional abasic residues (e.g., (Ab) or (AbAb)). In some embodiments, UUAb, UAb, or Ab are added to the 3′ end of the sense strand. In some embodiments, an abasic (deoxyribose) residue can be replaced with a ribitol (abasic ribose) residue.

[0085] In some embodiments, all or substantially all of the nucleotides of an RNAi agent are modified nucleotides. As used herein, an RNAi agent wherein substantially all of the nucleotides present are modified nucleotides is an RNAi agent having four or fewer (i.e., 0, 1, 2, 3, or 4) nucleotides in both the sense strand and the antisense strand being ribonucleotides (i.e., unmodified). As used herein, a sense strand wherein substantially all of the nucleotides present are modified nucleotides is a sense strand having two or fewer (i.e., 0, 1, or 2) nucleotides in the sense strand being unmodified ribonucleotides. As used herein, an antisense strand wherein substantially all of the nucleotides present are modified nucleotides is an antisense strand having two or fewer (i.e., 0, 1, or 2) nucleotides in the antisense strand being unmodified ribonucleotides. In some embodiments, one or more nucleotides of an RNAi agent is an unmodified ribonucleotide. Chemical structures for certain modified nucleotides are set forth in Table 11 herein.

### Modified Internucleoside Linkages

[0086] In some embodiments, one or more nucleotides of a RAGE RNAi agent are linked by non-standard linkages or backbones (i.e., modified internucleoside linkages or modified backbones). Modified internucleoside linkages or backbones include, but are not limited to, phosphorothioate groups (represented herein as a lower case “s”), chiral phosphorothioates, thiophosphates, phosphorodithioates, phosphotriesters, aminoalkyl-phosphotriesters, alkyl phosphonates (e.g., methyl phosphonates or 3′-alkylene phosphonates), chiral phosphonates, phosphinates, phosphoramidates (e.g., 3′-amino phosphoramidate, aminoalkylphosphoramidates, or thionophosphoramidates), thionoalkyl-phosphonates, thionoalkylphosphotriesters, morpholino linkages, boranophosphates having normal 3′-5′ linkages, 2′-5′ linked analogs of boranophosphates, or boranophosphates having inverted polarity wherein the adjacent pairs of nucleoside units are linked 3′-5′ to 5′-3′ or 2′-5′ to 5′-2′. In some embodiments, a modified internucleoside linkage or backbone lacks a phosphorus atom. Modified internucleoside linkages lacking a phosphorus atom include, but are not limited to, short chain alkyl or cycloalkyl inter-sugar linkages, mixed heteroatom and alkyl or cycloalkyl inter-sugar linkages, or one or more short chain heteroatomic or heterocyclic inter-sugar linkages. In some embodiments, modified internucleoside backbones include, but are not limited to, siloxane backbones, sulfide backbones, sulfoxide backbones, sulfone backbones, formacetyl and thioformacetyl backbones, methylene formacetyl and thioformacetyl backbones, alkene-containing backbones, sulfamate backbones, methyleneimino and methylenehydrazino backbones, sulfonate and sulfonamide backbones, amide backbones, and other backbones having mixed N, O, S, and CH₂ components.

[0087] In some embodiments, a sense strand of a RAGE RNAi agent can contain 1, 2, 3, 4, 5, or 6 phosphorothioate linkages, an antisense strand of a RAGE RNAi agent can contain 1, 2, 3, 4, 5, or 6 phosphorothioate linkages, or both the sense strand and the antisense strand independently can contain 1, 2, 3, 4, 5, or 6 phosphorothioate linkages. In some embodiments, a sense strand of a RAGE RNAi agent can contain 1, 2, 3, or 4 phosphorothioate linkages, an antisense strand of a RAGE RNAi agent can contain 1, 2, 3, or 4 phosphorothioate linkages, or both the sense strand and the antisense strand independently can contain 1, 2, 3, or 4 phosphorothioate linkages.

[0088] In some embodiments, a RAGE RNAi agent sense strand contains at least two phosphorothioate internucleoside linkages. In some embodiments, the phosphorothioate internucleoside linkages are between the nucleotides at positions 1-3 from the 3′ end of the sense strand. In some embodiments, one phosphorothioate internucleoside linkage is at the 5′ end of the sense strand nucleotide sequence, and another phosphorothioate linkage is at the 3′ end of the sense strand nucleotide sequence. In some embodiments, two phosphorothioate internucleoside linkage are located at the 5′ end of the sense strand, and another phosphorothioate linkage is at the 3′ end of the sense strand. In some embodiments, the sense strand does not include any phosphorothioate internucleoside linkages between the nucleotides, but contains one, two, or three phosphorothioate linkages between the terminal nucleotides on both the 5′ and 3′ ends and the optionally present inverted abasic residue terminal caps. In some embodiments, the targeting ligand is linked to the sense strand via a phosphorothioate linkage.

[0089] In some embodiments, a RAGE RNAi agent antisense strand contains four phosphorothioate internucleoside linkages. In some embodiments, the four phosphorothioate internucleoside linkages are between the nucleotides at positions 1-3 from the 5′ end of the antisense strand and between the nucleotides at positions 19-21, 20-22, 21-23, 22-24, 23-25, or 24-26 from the 5′ end. In some embodiments, three phosphorothioate internucleoside linkages are located between positions 1-4 from the 5′ end of the antisense strand, and a fourth phosphorothioate internucleoside linkage is located between positions 20-21 from the 5′ end of the antisense strand. In some embodiments, a RAGE RNAi agent contains at least three or four phosphorothioate internucleoside linkages in the antisense strand.

### Capping Residues or Moieties

[0090] In some embodiments, the sense strand may include one or more capping residues or moieties, sometimes referred to in the art as a “cap,” a “terminal cap,” or a “capping residue.” As used herein, a “capping residue” is a non-nucleotide compound or other moiety that can be incorporated at one or more termini of a nucleotide sequence of an RNAi agent disclosed herein. A capping residue can provide the RNAi agent, in some instances, with certain beneficial properties, such as, for example, protection against exonuclease degradation. In some embodiments, inverted abasic residues (invAb) (also referred to in the art as “inverted abasic sites”) are added as capping residues (see Table 11). (See, e.g., F. Czauderna, Nucleic Acids Res., 2003, 31(11), 2705-16). Capping residues are generally known in the art, and include, for example, inverted abasic residues as well as carbon chains such as a terminal C₃H₇ (propyl), C₆H₁₃ (hexyl), or C₁₂H₂₅ (dodecyl) groups. In some embodiments, a capping residue is present at either the 5′ terminal end, the 3′ terminal end, or both the 5′ and 3′ terminal ends of the sense strand. In some embodiments, the 5′ end and/or the 3′ end of the sense strand may include more than one inverted abasic deoxyribose moiety as a capping residue.

[0091] In some embodiments, one or more inverted abasic residues (invAb) are added to the 3′ end of the sense strand. In some embodiments, one or more inverted abasic residues (invAb) are added to the 5′ end of the sense strand. In some embodiments, one or more inverted abasic residues or inverted abasic sites are inserted between the targeting ligand and the nucleotide sequence of the sense strand of the RNAi agent. In some embodiments, the inclusion of one or more inverted abasic residues or inverted abasic sites at or near the terminal end or terminal ends of the sense strand of an RNAi agent allows for enhanced activity or other desired properties of an RNAi agent.

[0092] In some embodiments, one or more inverted abasic residues (invAb) are added to the 5′ end of the sense strand. In some embodiments, one or more inverted abasic residues can be inserted between the targeting ligand and the nucleotide sequence of the sense strand of the RNAi agent. The inverted abasic residues may be linked via phosphate, phosphorothioate (e.g., shown herein as (invAb)s)), or other internucleoside linkages. In some embodiments, the inclusion of one or more inverted abasic residues at or near the terminal end or terminal ends of the sense strand of an RNAi agent may allow for enhanced activity or other desired properties of an RNAi agent. In some embodiments, an inverted abasic (deoxyribose) residue can be replaced with an inverted ribitol (abasic ribose) residue. In some embodiments, the 3′ end of the antisense strand core stretch sequence, or the 3′ end of the antisense strand sequence, may include an inverted abasic residue. The chemical structures for inverted abasic deoxyribose residues are shown in Table 11 below.

### RAGE RNAi Agents

[0093] The RAGE RNAi agents disclosed herein are designed to target specific positions on an AGER (RAGE) gene (e.g., SEQ ID NO:1 (NM 001136.5)). As defined herein, an antisense strand sequence is designed to target an AGER gene at a given position on the gene when the 5′ terminal nucleobase of the antisense strand is aligned with a position that is 21 nucleotides downstream (towards the 3′ end) from the position on the gene when base pairing to the gene. For example, as illustrated in Tables 1 and 2 herein, an antisense strand sequence designed to target an AGER gene at position 177 requires that when base pairing to the gene, the 5′ terminal nucleobase of the antisense strand is aligned with position 197 of an AGER gene.

[0094] As provided herein, a RAGE RNAi agent does not require that the nucleobase at position 1 (5′→3′) of the antisense strand be complementary to the gene, provided that there is at least 85% complementarity (e.g., at least 85, 86, 87, 88, 89, 90, 91, 92, 93, 94, 95, 96, 97, 98, 99, or 100% complementarity) of the antisense strand and the gene across a core stretch sequence of at least 16 consecutive nucleotides. For example, for a RAGE RNAi agent disclosed herein that is designed to target position 177 of an AGER gene, the 5′ terminal nucleobase of the antisense strand of the of the RAGE RNAi agent must be aligned with position 197 of the gene; however, the 5′ terminal nucleobase of the antisense strand may be, but is not required to be, complementary to position 197 of an AGER gene, provided that there is at least 85% complementarity (e.g., at least 85, 86, 87, 88, 89, 90, 91, 92, 93, 94, 95, 96, 97, 98, 99, or 100% complementarity) of the antisense strand and the gene across a core stretch sequence of at least 16 consecutive nucleotides. As shown by, among other things, the various examples disclosed herein, the specific site of binding of the gene by the antisense strand of the RAGE RNAi agent (e.g., whether the RAGE RNAi agent is designed to target an AGER gene at position 177, at position 90, at position 330, or at some other position) is an important factor to the level of inhibition achieved by the RAGE RNAi agent. (See, e.g., Kamola et al., The siRNA Non-seed Region and Its Target Sequences are Auxiliary Determinants of Off-Target Effects, PLOS Computational Biology, 11(12), FIG. 1 (2015)).

[0095] In some embodiments, the RAGE RNAi agents disclosed herein target an AGER gene at or near the positions of the AGER sequence shown in Table 1. In some embodiments, the antisense strand of a RAGE RNAi agent disclosed herein includes a core stretch sequence that is fully, substantially, or at least partially complementary to a target RAGE 19-mer sequence disclosed in Table 1.

TABLE 1
AGER (RAGE) 19-mer mRNA Target Sequences
(taken from homo sapiens advanced
glycosylation end-product specific receptor
(AGER), transcript variant 1, GenBank
NM_001136.5 (SEQ ID NO: 1))

| | | Corre- | |
|---|---|---|---|
| | | sponding | Targeted |
| | | Positions | Gene |
| | AGER (RAGE) | of | Position |
| SEQ | 19-mer | Sequence | (as |
| ID | Target Sequences | on SEQ | referred |
| No. | (5′ → 3′) | ID NO: 1 | to herein) |
| 2 | GAAUGGAAACUGAACACAG | 179-197 | 177 |
| 3 | GUAGGUGCUCAAAACAUCA | 92-110 | 90 |
| 4 | GCAAUGAACAGGAAUGGAA | 332-350 | 330 |
| 5 | AAUGGAAACUGAACACAGG | 180-198 | 178 |
| 6 | CAGAUUCCUGGGAAGCCAG | 386-404 | 384 |
| 7 | CUGGGAAGCCAGAAAUUGU | 393-411 | 391 |
| 8 | CACUGGUGCUGAAGUGUAA | 129-147 | 127 |
| 9 | GACAGAAGCUUGGAAGGUC | 202-220 | 200 |
| 10 | GGAUGAGGGGAUUUUCCGG | 307-325 | 305 |
| 11 | AUUCCUGGGAAGCCAGAAA | 389-407 | 387 |
| 12 | AUUCUGCCUCUGAACUCAC | 414-432 | 412 |
| 13 | CCCUGCAGGGACUCUUAGC | 481-499 | 479 |
| 14 | CCUGCAGGGACUCUUAGCU | 482-500 | 480 |
| 15 | CCACCUUCUCCUGUAGCUU | 642-660 | 640 |
| 16 | CUUCUCCUGUAGCUUCAGC | 646-664 | 644 |
| 17 | UGCUGGUCCUCAGUCUGUG | 63-81 | 61 |
| 18 | GCUGGUCCUCAGUCUGUGG | 64-82 | 62 |
| 19 | UCCGUGUCUACCAGAUUCC | 375-393 | 373 |
| 20 | CGUGUCUACCAGAUUCCUG | 377-395 | 375 |
| 21 | CACCUUCUCCUGUAGCUUC | 643-661 | 641 |
| 22 | CCUCAAAUCCACUGGAUGA | 830-848 | 828 |
| 23 | UAGAUUCUGCCUCUGAACU | 411-429 | 409 |
| 24 | GAUUCUGCCUCUGAACUCA | 413-431 | 411 |
| 25 | CUGGUGUUCCCAAUAAGGU | 435-453 | 433 |
| 26 | GGUGUUCCCAAUAAGGUGG | 437-455 | 435 |
| 27 | UUAGCUGGCACUUGGAUGG | 495-513 | 493 |
| 28 | UAAUGAGAAGGGAGUAUCU | 529-547 | 527 |
| 29 | GAGAAGGGAGUAUCUGUGA | 533-551 | 531 |
| 30 | GCAUCAGCAUCAUCGAACC | 981-999 | 979 |
| 31 | UGAACAGGAAUGGAAAGGA | 336-354 | 334 |
| 32 | CUACCGAGUCCGUGUCUAC | 367-385 | 365 |
| 33 | UGGGAAGCCAGAAAUUGUA | 394-412 | 392 |
| 34 | CCUAAUGAGAAGGGAGUAU | 527-545 | 525 |

[0096] Homo sapiens advanced glycosylation end-product specific receptor (AGER), transcript variant 1, GenBank NM_001136.5 (SEQ ID NO:1), gene transcript (1420 bases):

```
      1 agacagagcc aggaccctgg aaggaagcag gatggctgcc ggaacagcag ttggagcctg
    61 ggtgctggtc ctcagtctgt ggggggcagt agtaggtgct caaaacatca cagcccggat
  121 tggcgagcca ctggtgctga agtgtaaggg ggcccccaag aaaccacccc agcggctgga
  181 atggaaactg aacacaggcc ggacagaagc ttggaaggtc ctgtctcccc agggaggagg
  241 cccctgggac agtgtggctc gtgtccttcc caacggctcc ctcttccttc cggctgtcgg
  301 gatccaggat gaggggattt tccggtgcca ggcaatgaac aggaatggaa aggagaccaa
  361 gtccaactac cgagtccgtg tctaccagat tcctgggaag ccagaaattg tagattctgc
  421 ctctgaactc acggctggtg ttcccaataa ggtggggaca tgtgtgtcag agggaagcta
  481 ccctgcaggg actcttagct ggcacttgga tgggaagccc ctggtgccta atgagaaggg
  541 agtatctgtg aaggaacaga ccaggagaca ccctgagaca gggctcttca cactgcagtc
  601 ggagctaatg gtgaccccag cccggggagg agatccccgt cccaccttct cctgtagctt
  661 cagcccaggc cttccccgac accgggcctt gcgcacagcc cccatccagc cccgtgtctg
  721 ggagcctgtg cctctggagg aggtccaatt ggtggtggag ccagaaggtg gagcagtagc
  781 tcctggtgga accgtaaccc tgacctgtga agtccctgcc cagccctctc ctcaaatcca
  841 ctggatgaag gatggtgtgc ccttgcccct tccccccagc cctgtgctga tcctccctga
  901 gatagggcct caggaccagg gaacctacag ctgtgtggcc acccattcca gccacgggcc
  961 ccaggaaagc cgtgctgtca gcatcagcat catcgaacca ggcgaggagg ggccaactgc
1021 aggctctgtg ggaggatcag ggctgggaac tctagccctg gccctgggga tcctgggagg
1081 cctggggaca gccgccctgc tcattggggt catcttgtgg caaaggcggc aacgccgagg
1141 agaggagagg aaggccccag aaaaccagga ggaagaggag gagcgtgcag aactgaatca
1201 gtcggaggaa cctgaggcag gcgagagtag tactggaggg ccttgagggg cccacagaca
1261 gatcccatcc atcagctccc ttttcttttt cccttgaact gttctggcct cagaccaact
1321 ctctcctgta taatctctct cctgtataac cccaccttgc caagctttct tctacaacca
1381 gagcccccca caatgatgat taaacacctg acacatcttg
```

[0097] In some embodiments, a RAGE RNAi agent includes an antisense strand wherein position 19 of the antisense strand (5′→3′) is capable of forming abase pair with position 1 of a 19-mer target sequence disclosed in Table 1. In some embodiments, a RAGE RNAi agent includes an antisense strand wherein position 1 of the antisense strand (5′→3′) is capable of forming a base pair with position 19 of a 19-mer target sequence disclosed in Table 1.

[0098] In some embodiments, a RAGE RNAi agent includes an antisense strand wherein position 2 of the antisense strand (5′→3′) is capable of forming a base pair with position 18 of a 19-mer target sequence disclosed in Table 1. In some embodiments, a RAGE RNAi agent includes an antisense strand wherein positions 2 through 18 of the antisense strand (5′→3′) are capable of forming base pairs with each of the respective complementary bases located at positions 18 through 2 of the 19-mer target sequence disclosed in Table 1.

[0099] For the RNAi agents disclosed herein, the nucleotide at position 1 of the antisense strand (from 5′ end→3′ end) can be perfectly complementary to an AGER gene, or can be non-complementary to an AGER gene. In some embodiments, the nucleotide at position 1 of the antisense strand (from 5′ end→3′ end) is a U, A, or dT. In some embodiments, the nucleotide at position 1 of the antisense strand (from 5′ end→3′ end) forms an A:U or U:A base pair with the sense strand.

[0100] In some embodiments, a RAGE RNAi agent antisense strand comprises the sequence of nucleotides (from 5′ end→3′ end) 2-18 or 2-19 of any of the antisense strand sequences in Table 2 or Table 3. In some embodiments, a RAGE RNAi sense strand comprises the sequence of nucleotides (from 5′ end→3′ end) 1-17, 1-18, or 2-18 of any of the sense strand sequences in Table 2, Table 4, Table 5, or Table 6.

[0101] In some embodiments, a RAGE RNAi agent is comprised of (i) an antisense strand comprising the sequence of nucleotides (from 5′ end→3′ end) 2-18 or 2-19 of any of the antisense strand sequences in Table 2 or Table 3, and (ii) a sense strand comprising the sequence of nucleotides (from 5′ end→3′ end) 1-17 or 1-18 of any of the sense strand sequences in Table 2, Table 4, Table 5, or Table 6.

[0102] In some embodiments, the RAGE RNAi agents include core 19-mer nucleotide sequences shown in the following Table 2.

TABLE 2
RAGE RNAi Agent Antisense Strand and Sense Strand Core
Stretch Base Sequences (N=any nucleobase;
I = inosine (hypoxanthine)

| | Antisense Strand | | Sense Strand | | |
|---|---|---|---|---|---|
| | Base Sequence | | Base Sequence | | |
| | (5′ → 3′)) | | (5′ → 3′)) | Corresponding | |
| | (Shown as an | | (Shown as an | Positions of | |
| SEQ | Unmodified | SEQ | Unmodified | Identified | Targeted |
| ID | Nucleotide | ID | Nucleotide | Sequence on | Gene |
| NO:. | Sequence) | NO:. | Sequence) | SEQ ID NO: 1 | Position |
| 35 | UUGUGUUCAGUUUCCAUUC | 278 | GAAUGGAAACUGAACACAA | 179-197 | 177 |
| 36 | AUGUGUUCAGUUUCCAUUC | 279 | GAAUGGAAACUGAACACAU | 179-197 | 177 |
| 37 | CUGUGUUCAGUUUCCAUUC | 280 | GAAUGGAAACUGAACACAG | 179-197 | 177 |
| 38 | NUGUGUUCAGUUUCCAUUC | 281 | GAAUGGAAACUGAACACAN | 179-197 | 177 |
| 39 | NUGUGUUCAGUUUCCAUUN | 282 | NAAUGGAAACUGAACACAN | 179-197 | 177 |
| 40 | UUGUGUUCAGUUUCCAUUC | 283 | GAAUGGAAACUIAACACAA | 179-197 | 177 |
| 41 | AUGUGUUCAGUUUCCAUUC | 284 | GAAUGGAAACUIAACACAU | 179-197 | 177 |
| 42 | CUGUGUUCAGUUUCCAUUC | 285 | GAAUGGAAACUIAACACAG | 179-197 | 177 |
| 43 | NUGUGUUCAGUUUCCAUUC | 286 | GAAUGGAAACUIAACACAN | 179-197 | 177 |
| 44 | NUGUGUUCAGUUUCCAUUN | 287 | NAAUGGAAACUIAACACAN | 179-197 | 177 |
| 45 | UGAUGUUUUGAGCACCUAC | 288 | GUAGGUGCUCAAAACAUCA | 92-110 | 90 |
| 46 | AGAUGUUUUGAGCACCUAC | 289 | GUAGGUGCUCAAAACAUCU | 92-110 | 90 |
| 47 | NGAUGUUUUGAGCACCUAC | 290 | GUAGGUGCUCAAAACAUCN | 92-110 | 90 |
| 48 | NGAUGUUUUGAGCACCUAN | 291 | NUAGGUGCUCAAAACAUCN | 92-110 | 90 |
| 49 | UUCCAUUCCUGUUCAUUGC | 292 | GCAAUGAACAGGAAUGGAA | 332-350 | 330 |
| 50 | AUCCAUUCCUGUUCAUUGC | 293 | GCAAUGAACAGGAAUGGAU | 332-350 | 330 |
| 51 | NUCCAUUCCUGUUCAUUGC | 294 | GCAAUGAACAGGAAUGGAN | 332-350 | 330 |
| 52 | NUCCAUUCCUGUUCAUUGN | 295 | NCAAUGAACAGGAAUGGAN | 332-350 | 330 |
| 53 | UUCCAUUCCUGUUCAUUGC | 296 | GCAAUGAACAGGAAUIGAA | 332-350 | 330 |
| 54 | AUCCAUUCCUGUUCAUUGC | 297 | GCAAUGAACAGGAAUIGAU | 332-350 | 330 |
| 55 | NUCCAUUCCUGUUCAUUGC | 298 | GCAAUGAACAGGAAUIGAN | 332-350 | 330 |
| 56 | NUCCAUUCCUGUUCAUUGN | 299 | NCAAUGAACAGGAAUIGAN | 332-350 | 330 |
| 57 | UCUGUGUUCAGUUUCCAUU | 300 | AAUGGAAACUGAACACAGA | 180-198 | 178 |
| 58 | ACUGUGUUCAGUUUCCAUU | 301 | AAUGGAAACUGAACACAGU | 180-198 | 178 |
| 59 | CCUGUGUUCAGUUUCCAUU | 302 | AAUGGAAACUGAACACAGG | 180-198 | 178 |
| 60 | NCUGUGUUCAGUUUCCAUU | 303 | AAUGGAAACUGAACACAGN | 180-198 | 178 |
| 61 | NCUGUGUUCAGUUUCCAUN | 304 | NAUGGAAACUGAACACAGN | 180-198 | 178 |
| 62 | UCUGUGUUCAGUUUCCAUU | 305 | AAUGGAAACUGAACACAIA | 180-198 | 178 |
| 63 | ACUGUGUUCAGUUUCCAUU | 306 | AAUGGAAACUGAACACAIU | 180-198 | 178 |
| 64 | CCUGUGUUCAGUUUCCAUU | 307 | AAUGGAAACUGAACACAIG | 180-198 | 178 |
| 65 | NCUGUGUUCAGUUUCCAUU | 308 | AAUGGAAACUGAACACAIN | 180-198 | 178 |
| 66 | NCUGUGUUCAGUUUCCAUN | 309 | NAUGGAAACUGAACACAIN | 180-198 | 178 |
| 67 | UUGGCUUCCCAGGAAUCUG | 310 | CAGAUUCCUGGGAAGCCAA | 386-404 | 384 |
| 68 | AUGGCUUCCCAGGAAUCUG | 311 | CAGAUUCCUGGGAAGCCAU | 386-404 | 384 |
| 69 | CUGGCUUCCCAGGAAUCUG | 312 | CAGAUUCCUGGGAAGCCAG | 386-404 | 384 |
| 70 | NUGGCUUCCCAGGAAUCUG | 313 | CAGAUUCCUGGGAAGCCAN | 386-404 | 384 |
| 71 | NUGGCUUCCCAGGAAUCUN | 314 | NAGAUUCCUGGGAAGCCAN | 386-404 | 384 |
| 72 | UUGGCUUCCCAGGAAUCUG | 315 | CAGAUUCCUGGGAAICCAA | 386-404 | 384 |
| 73 | AUGGCUUCCCAGGAAUCUG | 316 | CAGAUUCCUGGGAAICCAU | 386-404 | 384 |
| 74 | CUGGCUUCCCAGGAAUCUG | 317 | CAGAUUCCUGGGAAICCAG | 386-404 | 384 |
| 75 | NUGGCUUCCCAGGAAUCUG | 318 | CAGAUUCCUGGGAAICCAN | 386-404 | 384 |
| 76 | NUGGCUUCCCAGGAAUCUN | 319 | NAGAUUCCUGGGAAICCAN | 386-404 | 384 |
| 77 | ACAAUUUCUGGCUUCCCAG | 320 | CUGGGAAGCCAGAAAUUGU | 393-411 | 391 |
| 78 | UCAAUUUCUGGCUUCCCAG | 321 | CUGGGAAGCCAGAAAUUGA | 393-411 | 391 |
| 79 | NCAAUUUCUGGCUUCCCAG | 322 | CUGGGAAGCCAGAAAUUGN | 393-411 | 391 |
| 80 | NCAAUUUCUGGCUUCCCAN | 323 | NUGGGAAGCCAGAAAUUGN | 393-411 | 391 |
| 81 | UUACACUUCAGCACCAGUG | 324 | CACUGGUGCUGAAGUGUAA | 129-147 | 127 |
| 82 | AUACACUUCAGCACCAGUG | 325 | CACUGGUGCUGAAGUGUAU | 129-147 | 127 |
| 83 | NUACACUUCAGCACCAGUG | 326 | CACUGGUGCUGAAGUGUAN | 129-147 | 127 |
| 84 | NUACACUUCAGCACCAGUN | 327 | NACUGGUGCUGAAGUGUAN | 129-147 | 127 |
| 85 | UACCUUCCAAGCUUCUGUC | 328 | GACAGAAGCUUGGAAGGUA | 202-220 | 200 |
| 86 | GACCUUCCAAGCUUCUGUC | 329 | GACAGAAGCUUGGAAGGUC | 202-220 | 200 |
| 87 | AACCUUCCAAGCUUCUGUC | 330 | GACAGAAGCUUGGAAGGUU | 202-220 | 200 |
| 88 | NACCUUCCAAGCUUCUGUC | 331 | GACAGAAGCUUGGAAGGUN | 202-220 | 200 |
| 89 | NACCUUCCAAGCUUCUGUN | 332 | NACAGAAGCUUGGAAGGUN | 202-220 | 200 |
| 90 | UACCUUCCAAGCUUCUGUC | 333 | GACAGAAGCUUGGAAGIUA | 202-220 | 200 |
| 91 | GACCUUCCAAGCUUCUGUC | 334 | GACAGAAGCUUGGAAGIUC | 202-220 | 200 |
| 92 | AACCUUCCAAGCUUCUGUC | 335 | GACAGAAGCUUGGAAGIUU | 202-220 | 200 |
| 93 | NACCUUCCAAGCUUCUGUC | 336 | GACAGAAGCUUGGAAGIUN | 202-220 | 200 |
| 94 | NACCUUCCAAGCUUCUGUN | 337 | NACAGAAGCUUGGAAGIUN | 202-220 | 200 |
| 95 | UCGGAAAAUCCCCUCAUCC | 338 | GGAUGAGGGGAUUUUCCGA | 307-325 | 305 |
| 96 | CCGGAAAAUCCCCUCAUCC | 339 | GGAUGAGGGGAUUUUCCGG | 307-325 | 305 |
| 97 | ACGGAAAAUCCCCUCAUCC | 340 | GGAUGAGGGGAUUUUCCGU | 307-325 | 305 |
| 98 | NCGGAAAAUCCCCUCAUCC | 341 | GGAUGAGGGGAUUUUCCGN | 307-325 | 305 |
| 99 | NCGGAAAAUCCCCUCAUCN | 342 | NGAUGAGGGGAUUUUCCGN | 307-325 | 305 |
| 100 | UCGGAAAAUCCCCUCAUCC | 343 | GGAUGAGGGGAUUUUCCIA | 307-325 | 305 |
| 101 | CCGGAAAAUCCCCUCAUCC | 344 | GGAUGAGGGGAUUUUCCIG | 307-325 | 305 |
| 102 | ACGGAAAAUCCCCUCAUCC | 345 | GGAUGAGGGGAUUUUCCIU | 307-325 | 305 |
| 103 | NCGGAAAAUCCCCUCAUCC | 346 | GGAUGAGGGGAUUUUCCIN | 307-325 | 305 |
| 104 | NCGGAAAAUCCCCUCAUCN | 347 | NGAUGAGGGGAUUUUCCIN | 307-325 | 305 |
| 105 | UUUCUGGCUUCCCAGGAAU | 348 | AUUCCUGGGAAGCUAGAAA | 389-407 | 387 |
| 106 | AUUCUGGCUUCCCAGGAAU | 349 | AUUCCUGGGAAGCUAGAAU | 389-407 | 387 |
| 107 | NUUCUGGCUUCCCAGGAAU | 350 | AUUCCUGGGAAGCUAGAAN | 389-407 | 387 |
| 108 | NUUCUGGCUUCCCAGGAAN | 351 | NUUCCUGGGAAGCUAGAAN | 389-407 | 387 |
| 109 | UUGAGUUCAGAGGCAGAAU | 352 | AUUCUGCCUCUGAACUCAC | 414-432 | 412 |
| 110 | GUGAGUUCAGAGGCAGAAU | 353 | AUUCUGCCUCUGAACUCAC | 414-432 | 412 |
| 111 | AUGAGUUCAGAGGCAGAAU | 354 | AUUCUGCCUCUGAACUCAU | 414-432 | 412 |
| 112 | NUGAGUUCAGAGGCAGAAU | 355 | AUUCUGCCUCUGAACUCAN | 414-432 | 412 |
| 113 | NUGAGUUCAGAGGCAGAAN | 356 | NUUCUGCCUCUGAACUCAN | 414-432 | 412 |
| 114 | UCUAAGAGUCCCUGCAGGG | 357 | CCCUGCAGGGACUCUUAGA | 481-499 | 479 |
| 115 | ACUAAGAGUCCCUGCAGGG | 358 | CCCUGCAGGGACUCUUAGU | 481-499 | 479 |
| 116 | GCUAAGAGUCCCUGCAGGG | 359 | CCCUGCAGGGACUCUUAGC | 481-499 | 479 |
| 117 | NCUAAGAGUCCCUGCAGGG | 360 | CCCUGCAGGGACUCUUAGN | 481-499 | 479 |
| 118 | NCUAAGAGUCCCUGCAGGN | 361 | NCCUGCAGGGACUCUUAGN | 481-499 | 479 |
| 119 | AGCUAAGAGUCCCUGCAGG | 362 | CCUGCAGGGACUCUUAGCU | 482-500 | 480 |
| 120 | UGCUAAGAGUCCCUGCAGG | 363 | CCUGCAGGGACUCUUAGCA | 482-500 | 480 |
| 121 | NGCUAAGAGUCCCUGCAGG | 364 | CCUGCAGGGACUCUUAGCN | 482-500 | 480 |
| 122 | NGCUAAGAGUCCCUGCAGN | 365 | NCUGCAGGGACUCUUAGCN | 482-500 | 480 |
| 123 | AGCUAAGAGUCCCUGCAGG | 366 | CCUGCAGGGACUCUUAICU | 482-500 | 480 |
| 124 | UGCUAAGAGUCCCUGCAGG | 367 | CCUGCAGGGACUCUUAICA | 482-500 | 480 |
| 125 | NGCUAAGAGUCCCUGCAGG | 368 | CCUGCAGGGACUCUUAICN | 482-500 | 480 |
| 126 | NGCUAAGAGUCCCUGCAGN | 369 | NCUGCAGGGACUCUUAICN | 482-500 | 480 |
| 127 | AAGCUACAGGAGAAGGUGG | 370 | CCACCUUCUCCUGUAGCUU | 642-660 | 640 |
| 128 | UAGCUACAGGAGAAGGUGG | 371 | CCACCUUCUCCUGUAGCUA | 642-660 | 640 |
| 129 | NAGCUACAGGAGAAGGUGG | 372 | CCACCUUCUCCUGUAGCUN | 642-660 | 640 |
| 130 | NAGCUACAGGAGAAGGUGN | 373 | NCACCUUCUCCUGUAGCUN | 642-660 | 640 |
| 131 | AAGCUACAGGAGAAGGUGG | 374 | CCACCUUCUCCUGUAICUU | 642-660 | 640 |
| 132 | UAGCUACAGGAGAAGGUGG | 375 | CCACCUUCUCCUGUAICUA | 642-660 | 640 |
| 133 | NAGCUACAGGAGAAGGUGG | 376 | CCACCUUCUCCUGUAICUN | 642-660 | 640 |
| 134 | NAGCUACAGGAGAAGGUGN | 377 | NCACCUUCUCCUGUAICUN | 642-660 | 640 |
| 135 | UCUGAAGCUACAGGAGAAG | 378 | CUUCUCCUGUAGCUUCAGA | 646-664 | 644 |
| 136 | ACUGAAGCUACAGGAGAAG | 379 | CUUCUCCUGUAGCUUCAGU | 646-664 | 644 |
| 137 | GCUGAAGCUACAGGAGAAG | 380 | CUUCUCCUGUAGCUUCAGC | 646-664 | 644 |
| 138 | NCUGAAGCUACAGGAGAAG | 381 | CUUCUCCUGUAGCUUCAGN | 646-664 | 644 |
| 139 | NCUGAAGCUACAGGAGAAN | 382 | NUUCUCCUGUAGCUUCAGN | 646-664 | 644 |
| 140 | UCUGAAGCUACAGGAGAAG | 383 | CUUCUCCUGUAGCUUCAIA | 646-664 | 644 |
| 141 | ACUGAAGCUACAGGAGAAG | 384 | CUUCUCCUGUAGCUUCAIU | 646-664 | 644 |
| 142 | GCUGAAGCUACAGGAGAAG | 385 | CUUCUCCUGUAGCUUCAIC | 646-664 | 644 |
| 143 | NCUGAAGCUACAGGAGAAG | 386 | CUUCUCCUGUAGCUUCAIN | 646-664 | 644 |
| 144 | NCUGAAGCUACAGGAGAAN | 387 | NUUCUCCUGUAGCUUCAIN | 646-664 | 644 |
| 145 | UACAGACUGAGGACCAGCA | 388 | UGCUGGUCCUCAGUCUGUA | 63-81 | 61 |
| 146 | AACAGACUGAGGACCAGCA | 389 | UGCUGGUCCUCAGUCUGUU | 63-81 | 61 |
| 147 | CACAGACUGAGGACCAGCA | 390 | UGCUGGUCCUCAGUCUGUG | 63-81 | 61 |
| 148 | NACAGACUGAGGACCAGCA | 391 | UGCUGGUCCUCAGUCUGUN | 63-81 | 61 |
| 149 | NACAGACUGAGGACCAGCN | 392 | UGCUGGUCCUCAGUCUGUN | 63-81 | 61 |
| 150 | UACAGACUGAGGACCAGCA | 393 | UGCUGGUCCUCAGUCUIUA | 63-81 | 61 |
| 151 | AACAGACUGAGGACCAGCA | 394 | UGCUGGUCCUCAGUCUIUU | 63-81 | 61 |
| 152 | CACAGACUGAGGACCAGCA | 395 | UGCUGGUCCUCAGUCUIUG | 63-81 | 61 |
| 153 | NACAGACUGAGGACCAGCA | 396 | UGCUGGUCCUCAGUCUIUN | 63-81 | 61 |
| 154 | NACAGACUGAGGACCAGCN | 397 | UGCUGGUCCUCAGUCUIUN | 63-81 | 61 |
| 155 | UCACAGACUGAGGACCAGC | 398 | GCUGGUCCUCAGUCUGUGA | 64-82 | 62 |
| 156 | ACACAGACUGAGGACCAGC | 399 | GCUGGUCCUCAGUCUGUGU | 64-82 | 62 |
| 157 | NCACAGACUGAGGACCAGC | 400 | GCUGGUCCUCAGUCUGUGN | 64-82 | 62 |
| 158 | NCACAGACUGAGGACCAGN | 401 | NCUGGUCCUCAGUCUGUGN | 64-82 | 62 |
| 159 | UCACAGACUGAGGACCAGC | 402 | GCUGGUCCUCAGUCUGUIA | 64-82 | 62 |
| 160 | ACACAGACUGAGGACCAGC | 403 | GCUGGUCCUCAGUCUGUIU | 64-82 | 62 |
| 161 | NCACAGACUGAGGACCAGC | 404 | GCUGGUCCUCAGUCUGUIN | 64-82 | 62 |
| 162 | NCACAGACUGAGGACCAGN | 405 | NCUGGUCCUCAGUCUGUIN | 64-82 | 62 |
| 163 | UCACAGACUGAGGACCAGC | 406 | GCUGGUCCUCAGUCUIUGA | 64-82 | 62 |
| 164 | ACACAGACUGAGGACCAGC | 407 | GCUGGUCCUCAGUCUIUGU | 64-82 | 62 |
| 165 | NCACAGACUGAGGACCAGC | 408 | GCUGGUCCUCAGUCUIUGN | 64-82 | 62 |
| 166 | NCACAGACUGAGGACCAGN | 409 | NCUGGUCCUCAGUCUIUGN | 64-82 | 62 |
| 167 | UGAAUCUGGUAGACACGGA | 410 | UCCGUGUCUACCAGAUUCA | 375-393 | 373 |
| 168 | AGAAUCUGGUAGACACGGA | 411 | UCCGUGUCUACCAGAUUCU | 375-393 | 373 |
| 169 | GGAAUCUGGUAGACACGGA | 412 | UCCGUGUCUACCAGAUUCC | 375-393 | 373 |
| 170 | NGAAUCUGGUAGACACGGA | 413 | UCCGUGUCUACCAGAUUCN | 375-393 | 373 |
| 171 | NGAAUCUGGUAGACACGGN | 414 | NCCGUGUCUACCAGAUUCN | 375-393 | 373 |
| 172 | UGAAUCUGGUAGACACGGA | 415 | UCCGUGUCUACCAIAUUCA | 375-393 | 373 |
| 173 | AGAAUCUGGUAGACACGGA | 416 | UCCGUGUCUACCAIAUUCU | 375-393 | 373 |
| 174 | GGAAUCUGGUAGACACGGA | 417 | UCCGUGUCUACCAIAUUCC | 375-393 | 373 |
| 175 | NGAAUCUGGUAGACACGGA | 418 | UCCGUGUCUACCAIAUUCN | 375-393 | 373 |
| 176 | NGAAUCUGGUAGACACGGN | 419 | NCCGUGUCUACCAIAUUCN | 375-393 | 373 |
| 177 | UAGGAAUCUGGUAGACACG | 420 | CGUGUCUACCAGAUUCCUA | 377-395 | 375 |
| 178 | AAGGAAUCUGGUAGACACG | 421 | CGUGUCUACCAGAUUCCUU | 377-395 | 375 |
| 179 | CAGGAAUCUGGUAGACACG | 422 | CGUGUCUACCAGAUUCCUG | 377-395 | 375 |
| 180 | NAGGAAUCUGGUAGACACG | 423 | CGUGUCUACCAGAUUCCUN | 377-395 | 375 |
| 181 | NAGGAAUCUGGUAGACACN | 424 | NGUGUCUACCAGAUUCCUN | 377-395 | 375 |
| 182 | UAAGCUACAGGAGAAGGUG | 425 | CACCUUCUCCUGUAGCUUA | 643-661 | 641 |
| 183 | AAAGCUACAGGAGAAGGUG | 426 | CACCUUCUCCUGUAGCUUU | 643-661 | 641 |
| 184 | GAAGCUACAGGAGAAGGUG | 427 | CACCUUCUCCUGUAGCUUC | 643-661 | 641 |
| 185 | NAAGCUACAGGAGAAGGUG | 428 | CACCUUCUCCUGUAGCUUN | 643-661 | 641 |
| 186 | NAAGCUACAGGAGAAGGUN | 429 | NACCUUCUCCUGUAGCUUN | 643-661 | 641 |
| 187 | UAAGCUACAGGAGAAGGUG | 430 | CACCUUCUCCUGUAICUUA | 643-661 | 641 |
| 188 | AAAGCUACAGGAGAAGGUG | 431 | CACCUUCUCCUGUAICUUU | 643-661 | 641 |
| 189 | GAAGCUACAGGAGAAGGUG | 432 | CACCUUCUCCUGUAICUUC | 643-661 | 641 |
| 190 | NAAGCUACAGGAGAAGGUG | 433 | CACCUUCUCCUGUAICUUN | 643-661 | 641 |
| 191 | NAAGCUACAGGAGAAGGUN | 434 | NACCUUCUCCUGUAICUUN | 643-661 | 641 |
| 192 | UCAUCCAGUGGAUUUGAGG | 435 | CCUCAAAUCCACUGGAUGA | 830-848 | 828 |
| 193 | ACAUCCAGUGGAUUUGAGG | 436 | CCUCAAAUCCACUGGAUGU | 830-848 | 828 |
| 194 | NCAUCCAGUGGAUUUGAGG | 437 | CCUCAAAUCCACUGGAUGN | 830-848 | 828 |
| 195 | NCAUCCAGUGGAUUUGAGN | 438 | NCUCAAAUCCACUGGAUGN | 830-848 | 828 |
| 196 | UCAUCCAGUGGAUUUGAGG | 439 | CCUCAAAUCCACUIGAUGA | 830-848 | 828 |
| 197 | ACAUCCAGUGGAUUUGAGG | 440 | CCUCAAAUCCACUIGAUGU | 830-848 | 828 |
| 198 | NCAUCCAGUGGAUUUGAGG | 441 | CCUCAAAUCCACUIGAUGN | 830-848 | 828 |
| 199 | NCAUCCAGUGGAUUUGAGN | 442 | NCUCAAAUCCACUIGAUGN | 830-848 | 828 |
| 200 | AGUUCAGAGGCAGAAUCUA | 443 | UAGAUUCUGCCUCUGAACU | 411-429 | 409 |
| 201 | UGUUCAGAGGCAGAAUCUA | 444 | UAGAUUCUGCCUCUGAACA | 411-429 | 409 |
| 202 | NGUUCAGAGGCAGAAUCUA | 445 | UAGAUUCUGCCUCUGAACN | 411-429 | 409 |
| 203 | NGUUCAGAGGCAGAAUCUN | 446 | NAGAUUCUGCCUCUGAACN | 411-429 | 409 |
| 204 | AGUUCAGAGGCAGAAUCUA | 447 | UAGAUUCUGCCUCUIAACU | 411-429 | 409 |
| 205 | UGUUCAGAGGCAGAAUCUA | 448 | UAGAUUCUGCCUCUIAACA | 411-429 | 409 |
| 206 | NGUUCAGAGGCAGAAUCUA | 449 | UAGAUUCUGCCUCUIAACN | 411-429 | 409 |
| 207 | NGUUCAGAGGCAGAAUCUN | 450 | NAGAUUCUGCCUCUIAACN | 411-429 | 409 |
| 208 | UGAGUUCAGAGGCAGAAUC | 451 | GAUUCUGCCUCUGAACUCA | 413-431 | 411 |
| 209 | AGAGUUCAGAGGCAGAAUC | 452 | GAUUCUGCCUCUGAACUCU | 413-431 | 411 |
| 210 | NGAGUUCAGAGGCAGAAUN | 453 | GAUUCUGCCUCUGAACUCN | 413-431 | 411 |
| 211 | NGAGUUCAGAGGCAGAAUN | 454 | NAUUCUGCCUCUGAACUCN | 413-431 | 411 |
| 212 | ACCUUAUUGGGAACACCAG | 455 | CUGGUGUUCCCAAUAAGGU | 435-453 | 433 |
| 213 | UCCUUAUUGGGAACACCAG | 456 | CUGGUGUUCCCAAUAAGGA | 435-453 | 433 |
| 214 | NCCUUAUUGGGAACACCAG | 457 | CUGGUGUUCCCAAUAAGGN | 435-453 | 433 |
| 215 | NCCUUAUUGGGAACACCAN | 458 | NUGGUGUUCCCAAUAAGGN | 435-453 | 433 |
| 216 | UCACCUUAUUGGGAACACC | 459 | GGUGUUCCCAAUAAGGUGA | 437-455 | 435 |
| 217 | ACACCUUAUUGGGAACACC | 460 | GGUGUUCCCAAUAAGGUGU | 437-455 | 435 |
| 218 | CCACCUUAUUGGGAACACC | 461 | GGUGUUCCCAAUAAGGUGG | 437-455 | 435 |
| 219 | NCACCUUAUUGGGAACACC | 462 | GGUGUUCCCAAUAAGGUGN | 437-455 | 435 |
| 220 | NCACCUUAUUGGGAACACN | 463 | NGUGUUCCCAAUAAGGUGN | 437-455 | 435 |
| 221 | UCACCUUAUUGGGAACACC | 464 | GGUGUUCCCAAUAAIGUGA | 437-455 | 435 |
| 222 | ACACCUUAUUGGGAACACC | 465 | GGUGUUCCCAAUAAIGUGU | 437-455 | 435 |
| 223 | CCACCUUAUUGGGAACACC | 466 | GGUGUUCCCAAUAAIGUGG | 437-455 | 435 |
| 224 | NCACCUUAUUGGGAACACC | 467 | GGUGUUCCCAAUAAIGUGN | 437-455 | 435 |
| 225 | NCACCUUAUUGGGAACACN | 468 | NGUGUUCCCAAUAAIGUGN | 437-455 | 435 |
| 226 | UCAUCCAAGUGCCAGCUAA | 469 | UUAGCUGGCACUUGGAUGA | 495-513 | 493 |
| 227 | ACAUCCAAGUGCCAGCUAA | 470 | UUAGCUGGCACUUGGAUGU | 495-513 | 493 |
| 228 | CCAUCCAAGUGCCAGCUAA | 471 | UUAGCUGGCACUUGGAUGG | 495-513 | 493 |
| 229 | NCAUCCAAGUGCCAGCUAA | 472 | UUAGCUGGCACUUGGAUGN | 495-513 | 493 |
| 230 | NCAUCCAAGUGCCAGCUAN | 473 | NUAGCUGGCACUUGGAUGN | 495-513 | 493 |
| 231 | UCAUCCAAGUGCCAGCUAA | 474 | UUAGCUGGCACUUIGAUGA | 495-513 | 493 |
| 232 | ACAUCCAAGUGCCAGCUAA | 475 | UUAGCUGGCACUUIGAUGU | 495-513 | 493 |
| 233 | CCAUCCAAGUGCCAGCUAA | 476 | UUAGCUGGCACUUIGAUGG | 495-513 | 493 |
| 234 | NCAUCCAAGUGCCAGCUAA | 477 | UUAGCUGGCACUUIGAUGN | 495-513 | 493 |
| 235 | NCAUCCAAGUGCCAGCUAN | 478 | NUAGCUGGCACUUIGAUGN | 495-513 | 493 |
| 236 | AGAUACUCCCUUCUCAUUA | 479 | UAAUGAGAAGGGAGUAUCU | 529-547 | 527 |
| 237 | UGAUACUCCCUUCUCAUUA | 480 | UAAUGAGAAGGGAGUAUCA | 529-547 | 527 |
| 238 | NGAUACUCCCUUCUCAUUA | 481 | UAAUGAGAAGGGAGUAUCN | 529-547 | 527 |
| 239 | NGAUACUCCCUUCUCAUUN | 482 | NAAUGAGAAGGGAGUAUCN | 529-547 | 527 |
| 240 | AGAUACUCCCUUCUCAUUA | 483 | UAAUGAGAAGGGAIUAUCU | 529-547 | 527 |
| 241 | UGAUACUCCCUUCUCAUUA | 484 | UAAUGAGAAGGGAIUAUCA | 529-547 | 527 |
| 242 | NGAUACUCCCUUCUCAUUA | 485 | UAAUGAGAAGGGAIUAUCN | 529-547 | 527 |
| 243 | NGAUACUCCCUUCUCAUUN | 486 | NAAUGAGAAGGGAIUAUCN | 529-547 | 527 |
| 244 | UCACAGAUACUCCCUUCUC | 487 | GAGAAGGGAGUAUCUGUGA | 533-551 | 531 |
| 245 | ACACAGAUACUCCCUUCUC | 488 | GAGAAGGGAGUAUCUGUGU | 533-551 | 531 |
| 246 | NCACAGAUACUCCCUUCUC | 489 | GAGAAGGGAGUAUCUGUGN | 533-551 | 531 |
| 247 | NCACAGAUACUCCCUUCUN | 490 | NAGAAGGGAGUAUCUGUGN | 533-551 | 531 |
| 248 | UCACAGAUACUCCCUUCUC | 491 | GAGAAGGGAGUAUCUIUGA | 533-551 | 531 |
| 249 | ACACAGAUACUCCCUUCUC | 492 | GAGAAGGGAGUAUCUIUGU | 533-551 | 531 |
| 250 | NCACAGAUACUCCCUUCUC | 493 | GAGAAGGGAGUAUCUIUGN | 533-551 | 531 |
| 251 | NCACAGAUACUCCCUUCUN | 494 | NAGAAGGGAGUAUCUIUGN | 533-551 | 531 |
| 252 | UGUUCGAUGAUGCUGAUGC | 495 | GCAUCAGCAUCAUCGAACA | 981-999 | 979 |
| 253 | AGUUCGAUGAUGCUGAUGC | 496 | GCAUCAGCAUCAUCGAACU | 981-999 | 979 |
| 254 | GGUUCGAUGAUGCUGAUGC | 497 | GCAUCAGCAUCAUCGAACC | 981-999 | 979 |
| 255 | NGUUCGAUGAUGCUGAUGC | 498 | GCAUCAGCAUCAUCGAACN | 981-999 | 979 |
| 256 | NGUUCGAUGAUGCUGAUGN | 499 | NCAUCAGCAUCAUCGAACN | 981-999 | 979 |
| 257 | UGUUCGAUGAUGCUGAUGC | 500 | GCAUCAGCAUCAUCIAACA | 981-999 | 979 |
| 258 | AGUUCGAUGAUGCUGAUGC | 501 | GCAUCAGCAUCAUCIAACU | 981-999 | 979 |
| 259 | GGUUCGAUGAUGCUGAUGC | 502 | GCAUCAGCAUCAUCIAACC | 981-999 | 979 |
| 260 | NGUUCGAUGAUGCUGAUGC | 503 | GCAUCAGCAUCAUCIAACN | 981-999 | 979 |
| 261 | NGUUCGAUGAUGCUGAUGN | 504 | NCAUCAGCAUCAUCIAACN | 981-999 | 979 |
| 262 | ACCUUUCCAUUCCUGUUCA | 505 | UGAACAGGAAUGGAAAGGU | 336-354 | 334 |
| 263 | UCCUUUCCAUUCCUGUUCA | 506 | UGAACAGGAAUGGAAAGGA | 336-354 | 334 |
| 264 | NCCUUUCCAUUCCUGUUCA | 507 | UGAACAGGAAUGGAAAGGN | 336-354 | 334 |
| 265 | NCCUUUCCAUUCCUGUUCN | 508 | NGAACAGGAAUGGAAAGGN | 336-354 | 334 |
| 266 | AUAGACACGGACUCGGUAG | 509 | CUACCGAGUCCGUGUCUAA | 367-385 | 365 |
| 267 | UUAGACACGGACUCGGUAG | 510 | CUACCGAGUCCGUGUCUAU | 367-385 | 365 |
| 268 | NUAGACACGGACUCGGUAG | 511 | CUACCGAGUCCGUGUCUAN | 367-385 | 365 |
| 269 | NUAGACACGGACUCGGUAN | 512 | NUACCGAGUCCGUGUCUAN | 367-385 | 365 |
| 270 | AACAAUUUCUGGCUUCCCA | 513 | UGGGAAGCCAGAAAUUGUA | 394-412 | 392 |
| 271 | UACAAUUUCUGGCUUCCCA | 514 | UGGGAAGCCAGAAAUUGUU | 394-412 | 392 |
| 272 | NACAAUUUCUGGCUUCCCA | 515 | UGGGAAGCCAGAAAUUGUN | 394-412 | 392 |
| 273 | NACAAUUUCUGGCUUCCCN | 516 | NGGGAAGCCAGAAAUUGUN | 394-412 | 392 |
| 274 | AUACUCCCUUCUCAUUAGG | 517 | CCUAAUGAGAAGGGAGUAA | 527-545 | 525 |
| 275 | UUACUCCCUUCUCAUUAGG | 518 | CCUAAUGAGAAGGGAGUAU | 527-545 | 525 |
| 276 | NUACUCCCUUCUCAUUAGG | 519 | CCUAAUGAGAAGGGAGUAN | 527-545 | 525 |
| 277 | NUACUCCCUUCUCAUUAGN | 520 | NCUAAUGAGAAGGGAGUAN | 527-545 | 525 |

[0103] The RAGE RNAi agent sense strands and antisense strands that comprise or consist of the nucleotide sequences in Table 2 can be modified nucleotides or unmodified nucleotides. In some embodiments, the RAGE RNAi agents having the sense and antisense strand sequences that comprise or consist of any of the nucleotide sequences in Table 2 are all or substantially all modified nucleotides.

[0104] In some embodiments, the antisense strand of a RAGE RNAi agent disclosed herein differs by 0, 1, 2, or 3 nucleotides from any of the antisense strand sequences in Table 2. In some embodiments, the sense strand of a RAGE RNAi agent disclosed herein differs by 0, 1, 2, or 3 nucleotides from any of the sense strand sequences in Table 2.

[0105] In some embodiments, the antisense strand of a RAGE RNAi agent disclosed comprises at least 15 contiguous nucleotides differing by 0, 1, 2, or 3 nucleotides from any of the antisense strand sequences in Table 2. In some embodiments, the sense strand of a RAGE RNAi agent disclosed herein comprises at least 15 contiguous nucleotides differing by 0, 1, 2, or 3 nucleotides from any of the sense strand sequences in Table 2.

[0106] As used herein, each N listed in a sequence disclosed in Table 2 may be independently selected from any and all nucleobases (including those found on both modified and unmodified nucleotides). In some embodiments, an N nucleotide listed in a sequence disclosed in Table 2 has a nucleobase that is complementary to the N nucleotide at the corresponding position on the other strand. In some embodiments, an N nucleotide listed in a sequence disclosed in Table 2 has a nucleobase that is not complementary to the N nucleotide at the corresponding position on the other strand. In some embodiments, an N nucleotide listed in a sequence disclosed in Table 2 has a nucleobase that is the same as the N nucleotide at the corresponding position on the other strand. In some embodiments, an N nucleotide listed in a sequence disclosed in Table 2 has a nucleobase that is different from the N nucleotide at the corresponding position on the other strand.

[0107] Certain modified RAGE RNAi agent sense and antisense strands are provided in Table 3. Table 4. Table 5. Table 6, and Table 10. Certain modified RAGE RNAi agent antisense strands, as well as their underlying unmodified nucleobase sequences, are provided in Table 3. Certain modified RAGE RNAi agent sense strands, as well as their underlying unmodified nucleobase sequences, are provided in Tables 4, 5, and 6. In forming RAGE RNAi agents, each of the nucleotides in each of the underlying base sequences listed in Tables 3, 4, 5, and 6, as well as in Table 2, above, can be a modified nucleotide.

[0108] The RAGE RNAi agents described herein are formed by annealing an antisense strand with a sense strand. A sense strand containing a sequence listed in Table 2, Table 4, Table 5, or Table 6 can be hybridized to any antisense strand containing a sequence listed in Table 2 or Table 3, provided the two sequences have a region of at least 85% complementarity over a contiguous 16, 17, 18, 19, 20, or 21 nucleotide sequence.

[0109] In some embodiments, a RAGE RNAi agent antisense strand comprises a nucleotide sequence of any of the sequences in Table 2 or Table 3.

[0110] In some embodiments, a RAGE RNAi agent comprises or consists of a duplex having the nucleobase sequences of the sense strand and the antisense strand of any of the sequences in Table 2, Table 3, Table 4, Table 5, Table 6, or Table 10.

[0111] Examples of antisense strands containing modified nucleotides are provided in Table 3. Examples of sense strands containing modified nucleotides are provided in Tables 4, 5 and 6.

[0112] As used in Tables 3, 4, 5, 6, and 10, the following notations are used to indicate modified nucleotides, targeting groups, and linking groups:
[0113] A=adenosine-3′-phosphate
[0114] C=cytidine-3′-phosphate
[0115] G=guanosine-3′-phosphate
[0116] U=uridine-3′-phosphate
[0117] I=inosine-3′-phosphate
[0118] a=2′-O-methyladenosine-3′-phosphate
[0119] as =2′-O-methyladenosine-3′-phosphorothioate
[0120] c=2′-O-methylcytidine-3′-phosphate
[0121] cs=2′-O-methylcytidine-3′-phosphorothioate
[0122] g=2′-O-methylguanosine-3′-phosphate
[0123] gs=2′-O-methylguanosine-3′-phosphorothioate
[0124] i=2′-O-methylinosine-3′-phosphate
[0125] is =2′-O-methylinosine-3′-phosphorothioate
[0126] t=2′-O-methyl-5-methyluridine-3′-phosphate
[0127] ts=2′-O-methyl-5-methyluridine-3′-phosphorothioate
[0128] u=2′-O-methyluridine-3′-phosphate
[0129] us=2′-O-methyluridine-3′-phosphorothioate
[0130] Af=2′-fluoroadenosine-3′-phosphate
[0131] Afs=2′-fluoroadenosine-3′-phosporothioate
[0132] Cf=2′-fluorocytidine-3′-phosphate
[0133] Cfs=2′-fluorocytidine-3′-phosphorothioate
[0134] Gf=2′-fluoroguanosine-3′-phosphate
[0135] Gfs=2′-fluoroguanosine-3′-phosphorothioate
[0136] Tf=2′-fluoro-5′-methyluridine-3′-phosphate
[0137] Tfs=2′-fluoro-5′-methyluridine-3′-phosphorothioate
[0138] Uf=2′-fluorouridine-3′-phosphate
[0139] Ufs=2′-fluorouridine-3′-phosphorothioate
[0140] dT=2′-deoxythymidine-3′-phosphate
[0141] A_{UNA}=2′,3′-seco-adenosine-3′-phosphate
[0142] A_{UNA}s=2′,3′-seco-adenosine-3′-phosphorothioate
[0143] C_{UNA}=2′,3′-seco-cytidine-3′-phosphate
[0144] C_{UNA}s=2′,3′-seco-cytidine-3′-phosphorothioate
[0145] G_{UNA}=2′,3′-seco-guanosine-3′-phosphate
[0146] G_{UNA}s=2′,3′-seco-guanosine-3′-phosphorothioate
[0147] U_{UNA}=2′,3′-seco-uridine-3′-phosphate
[0148] U_{UNA}s=2′,3′-seco-uridine-3′-phosphorothioate
[0149] a_2N=see Table 11
[0150] a_2Ns=see Table 11
[0151] (invAb)=inverted abasic deoxyribonucleotide-5′-phosphate, see Table 11
[0152] (invAb)s=inverted abasic deoxyribonucleotide-5′-phosphorothioate, see Table 11
[0153] s=phosphorothioate linkage
[0154] p=terminal phosphate (as synthesized)
[0155] vpdN=vinyl phosphonate deoxyribonucleotide
[0156] cPrpa=5′-cyclopropyl phosphonate-2′-O-methyladenosine-3′-phosphate (see Table 11)
[0157] cPrpas=5′-cyclopropyl phosphonate-2′-O-methyladenosine-3′-phosphorothioate (see Table 11)
[0158] cPrpu=5′-cyclopropyl phosphonate-2′-O-methyluridine-3′-phosphate (see Table 11)
[0159] cPrpus=5′-cyclopropyl phosphonate-2′-O-methyluridine-3′-phosphorothioate (see Table 11)
[0160] (Alk-SS-C6)=see Table 11
[0161] (C6-SS-Alk)=see Table 11
[0162] (C6-SS-C6)=see Table 11
[0163] (6-SS-6)=see Table 11
[0164] (C6-SS-Alk-Me)=see Table 11
[0165] (NH2-C6)=see Table 11
[0166] (TriAlk14)=see Table 11
[0167] (TriAlk14)s=see Table 11
[0168] —C6-=see Table 11
[0169] —C6s-=see Table 11
[0170] -L6-C6-=see Table 11
[0171] -L6-C6s-=see Table 11
[0172] Alk-cyHex-=see Table 11
[0173] Alk-cyHexs-=see Table 11
[0174] (TA14)=see Table 11 (structure of (TriAlk14)s after conjugation)
[0175] (TA14)s=see Table 11 (structure of (TriAlk14)s after conjugation)

[0176] As the person of ordinary skill in the art would readily understand, unless otherwise indicated by the sequence (such as, for example, by a phosphorothioate linkage “s”), when present in an oligonucleotide, the nucleotide monomers are mutually linked by 5′-3′-phosphodiester bonds. As the person of ordinary skill in the art would clearly understand, the inclusion of a phosphorothioate linkage as shown in the modified nucleotide sequences disclosed herein replaces the phosphodiester linkage typically present in oligonucleotides. Further, the person of ordinary skill in the art would readily understand that the terminal nucleotide at the 3′ end of a given oligonucleotide sequence would typically have a hydroxyl (—OH) group at the respective 3′ position of the given monomer instead of a phosphate moiety ex vivo. Additionally, for the embodiments disclosed herein, when viewing the respective strand 5′→3′, the inverted abasic residues are inserted such that the 3′ position of the deoxyribose is linked at the 3′ end of the preceding monomer on the respective strand (see, e.g., Table 11). Moreover, as the person of ordinary skill would readily understand and appreciate, while the phosphorothioate chemical structures depicted herein typically show the anion on the sulfur atom, the inventions disclosed herein encompass all phosphorothioate tautomers (e.g., where the sulfur atom has a double-bond and the anion is on an oxygen atom). Unless expressly indicated otherwise herein, such understandings of the person of ordinary skill in the art are used when describing the RAGE RNAi agents and compositions of RAGE RNAi agents disclosed herein.

[0177] Certain examples of targeting groups and linking groups used with the RAGE RNAi agents disclosed herein are included in the chemical structures provided below in Table 11. Each sense strand and/or antisense strand can have any targeting groups or linking groups listed herein, as well as other targeting or linking groups, conjugated to the 5′ and/or 3′ end of the sequence.

TABLE 3
RAGE RNAi Agent Antisense Strand Sequences

| | | | Underlying Base | |
|---|---|---|---|---|
| | | | Sequence (5′ → 3′) | |
| | | SEQ | (Shown as an Unmod- | SEQ |
| AS Strand | | ID | ified Nucleotide | ID |
| ID | Modified Antisense Strand (5′ → 3′) | NO. | Sequence) | NO. |
| AM10308-AS | usUfsgsUfgUfuCfaGfuUfuCfcAfuUfcCfsg | 521 | UUGUGUUCAGUUUCCAUUCCG | 780 |
| AM10309-AS | cPrpusUfsgsUfgUfuCfaGfuUfuCfcAfuUfcCfsg | 522 | UUGUGUUCAGUUUCCAUUCCG | 780 |
| AM10311-AS | usCfsusGfuGfuUfcAfgUfuUfcCfaUfuCfsc | 523 | UCUGUGUUCAGUUUCCAUUCC | 781 |
| AM10312-AS | cPrpusCfsusGfuGfuUfcAfgUfuUfcCfaUfuCfsc | 524 | UCUGUGUUCAGUUUCCAUUCC | 781 |
| AM10314-AS | usUfsgsGfcUfuCfcCfaGfgAfaUfcUfgGfsu | 525 | UUGGCUUCCCAGGAAUCUGGU | 782 |
| AM10315-AS | cPrpusUfsgsGfcUfuCfcCfaGfgAfaUfcUfgGfsu | 526 | UUGGCUUCCCAGGAAUCUGGU | 782 |
| AM10317-AS | asCfsasAfuUfuCfuGfgCfuUfcCfcAfgGfsa | 527 | ACAAUUUCUGGCUUCCCAGGA | 783 |
| AM10318-AS | cPrpasCfsasAfuUfuCfuGfgCfuUfcCfcAfgGfsa | 528 | ACAAUUUCUGGCUUCCCAGGA | 783 |
| AM10467-AS | usUfsasCfaCfuUfcAfgCfaCfcAfgUfgGfsc | 529 | UUACACUUCAGCACCAGUGGC | 784 |
| AM10469-AS | usAfscsCfuUfcCfaAfgCfuUfcUfgUfcCfsg | 530 | UACCUUCCAAGCUUCUGUCCG | 785 |
| AM10471-AS | usCfsgsGfaAfaAfuCfcCfcUfcAfuCfcUfsg | 531 | UCGGAAAAUCCCCUCAUCCUG | 786 |
| AM10473-AS | usUfsusCfuGfgCfuUfcCfcAfgGfaAfuCfsu | 532 | UUUCUGGCUUCCCAGGAAUCU | 787 |
| AM10475-AS | usUfsgsAfgUfuCfaGfaGfgCfaGfaAfuCfsu | 533 | UUGAGUUCAGAGGCAGAAUCU | 788 |
| AM10477-AS | usCfsusAfaGfaGfuCfcCfuGfcAfgGfgUfsa | 534 | UCUAAGAGUCCCUGCAGGGUA | 789 |
| AM10479-AS | asGfscsUfaAfgAfgUfcCfcUfgCfaGfgGfsu | 535 | AGCUAAGAGUCCCUGCAGGGU | 790 |
| AM10481-AS | asAfsgsCfuAfcAfgGfaGfaAfgGfuGfgGfsa | 536 | AAGCUACAGGAGAAGGUGGGA | 791 |
| AM10483-AS | usCfsusGfaAfgCfuAfcAfgGfaGfaAfgGfsu | 537 | UCUGAAGCUACAGGAGAAGGU | 792 |
| AM10571-AS | usAfscsAfgAfcUfgAfgGfaCfcAfgCfaCfsc | 538 | UACAGACUGAGGACCAGCACC | 793 |
| AM10573-AS | usAfscsAfgAfC_{UNA}UfgAfgGfaCfcAfgCfaCfsc | 539 | UACAGACUGAGGACCAGCACC | 793 |
| AM10575-AS | usCfsasCfaGfaCfuGfaGfgAfcCfaGfcAfsc | 540 | UCACAGACUGAGGACCAGCAC | 794 |
| AM10717-AS | usUfsgsUfgUfuCfaGfuUfuCfcAfuUfcCfsc | 541 | UUGUGUUCAGUUUCCAUUCCC | 795 |
| AM10720-AS | usUfsgsUfgUfU_{UNA}CfaGfuUfuCfcAfuUfcCfsg | 542 | UUGUGUUCAGUUUCCAUUCCG | 780 |
| AM10722-AS | usUfsgsUfgUfucaguUfuCfcAfuUfcCfsg | 543 | UUGUGUUCAGUUUCCAUUCCG | 780 |
| AM10723-AS | usUfsgsuguucaguUfuCfcAfuuccsg | 544 | UUGUGUUCAGUUUCCAUUCCG | 780 |
| AM10724-AS | usUfsgsuguucaGfuUfuCfcAfuuccsg | 545 | UUGUGUUCAGUUUCCAUUCCG | 780 |
| AM10752-AS | usGfsasUfgUfuUfuGfaGfcAfcCfuAfcUfsc | 546 | UGAUGUUUUGAGCACCUACUC | 796 |
| AM10754-AS | usUfscsCfaUfuCfcUfgUfuCfaUfuGfcCfsu | 547 | UUCCAUUCCUGUUCAUUGCCU | 797 |
| AM10756-AS | usGfsasAfuCfuGfgUfaGfaCfaCfgGfaCfsu | 548 | UGAAUCUGGUAGACACGGACU | 798 |
| AM10758-AS | usAfsgsGfaAfuCfuGfgUfaGfaCfaCfgGfsa | 549 | UAGGAAUCUGGUAGACACGGA | 799 |
| AM10760-AS | usAfsasGfcUfaCfaGfgAfgAfaGfgUfgGfsg | 550 | UAAGCUACAGGAGAAGGUGGG | 800 |
| AM10762-AS | usCfsasUfcCfaGfuGfgAfuUfuGfaGfgAfsg | 551 | UCAUCCAGUGGAUUUGAGGAG | 801 |
| AM10774-AS | asGfsusUfcAfgAfgGfcAfgAfaUfcUfaCfsc | 552 | AGUUCAGAGGCAGAAUCUACC | 802 |
| AM10776-AS | usGfsasGfuUfC_{UNA}AfgAfgGfcAfgAfaUfcUfsa | 553 | UGAGUUCAGAGGCAGAAUCUA | 803 |
| AM10778-AS | asCfscsUfuAfuUfgGfgAfaCfaCfcAfgCfsc | 554 | ACCUUAUUGGGAACACCAGCC | 804 |
| AM10780-AS | usCfsasCfcUfuAfuUfgGfgAfaCfaCfcAfsg | 555 | UCACCUUAUUGGGAACACCAG | 805 |
| AM10782-AS | usCfsasUfcCfaAfgUfgCfcAfgCfuAfaGfsc | 556 | UCAUCCAAGUGCCAGCUAAGC | 806 |
| AM10784-AS | asGfsasUfaCfuCfcCfuUfcUfcAfuUfaGfsg | 557 | AGAUACUCCCUUCUCAUUAGG | 807 |
| AM10786-AS | usCfsasCfaGfaUfaCfuCfcCfuUfcUfcAfsc | 558 | UCACAGAUACUCCCUUCUCAC | 808 |
| AM10788-AS | usGfsusUfcGfaUfgAfuGfcUfgAfuGfcUfsg | 559 | UGUUCGAUGAUGCUGAUGCUG | 809 |
| AM11103-AS | cPrpusUfgUfgUfuCfaGfuUfuCfcAfuUfcCfsg | 560 | UUGUGUUCAGUUUCCAUUCCG | 780 |
| AM11104-AS | cPrpuUfgUfgUfuCfaGfuUfuCfcAfuUfcCfsg | 561 | UUGUGUUCAGUUUCCAUUCCG | 780 |
| AM11188-AS | cPrpusUfsgsuguucaguUfuCfcAfuuccsg | 562 | UUGUGUUCAGUUUCCAUUCCG | 780 |
| AM11190-AS | usUfsgsuguuC_{UNA}aguUfuCfcAfuuccsg | 563 | UUGUGUUCAGUUUCCAUUCCG | 780 |
| AM11191-AS | usUfsgsuguU_{UNA}caguUfuCfcAfuuccsg | 564 | UUGUGUUCAGUUUCCAUUCCG | 780 |
| AM11192-AS | usUfsgsugU_{UNA}ucaguUfuCfcAfuuccsg | 565 | UUGUGUUCAGUUUCCAUUCCG | 780 |
| AM11194-AS | usUfsgsuguucaguUfuCfcAfuuccsc | 566 | UUGUGUUCAGUUUCCAUUCCC | 795 |
| AM11196-AS | usUfsgsuguucaguUfuCfcAfuuccsa | 567 | UUGUGUUCAGUUUCCAUUCCA | 810 |
| AM11757-AS | cPrpuUfguguucaguUfuCfcAfuuccsg | 568 | UUGUGUUCAGUUUCCAUUCCG | 780 |
| AM11758-AS | cPrpuUfguguU_{UNA}caguUfuCfcAfuuccsg | 569 | UUGUGUUCAGUUUCCAUUCCG | 780 |
| AM11759-AS | cPrpuUfguguucaguUfuCfcAfuuccsc | 570 | UUGUGUUCAGUUUCCAUUCCC | 795 |
| AM11760-AS | cPrpuUfguguU_{UNA}caguUfuCfcAfuuccsc | 571 | UUGUGUUCAGUUUCCAUUCCC | 795 |
| AM11761-AS | usUfsgsuguU_{UNA}caguUfuCfcAfuuccsc | 572 | UUGUGUUCAGUUUCCAUUCCC | 795 |
| AM11762-AS | cPrpusUfsgsuguU_{UNA}caguUfuCfcAfuuccsg | 573 | UUGUGUUCAGUUUCCAUUCCG | 780 |
| AM11763-AS | cPrpusUfsgsuguucaguUfuCfcAfuuccsc | 574 | UUGUGUUCAGUUUCCAUUCCC | 795 |
| AM11764-AS | cPrpusUfsgsuguU_{UNA}caguUfuCfcAfuuccsc | 575 | UUGUGUUCAGUUUCCAUUCCC | 795 |
| AM11889-AS | usCfscsUfuUfcCfaUfuCfcUfgUfuCfaUfsc | 576 | UCCUUUCCAUUCCUGUUCAUC | 811 |
| AM11892-AS | usUfsasGfaCfaCfgGfaCfuCfgGfuAfgUfsc | 577 | UUAGACACGGACUCGGUAGUC | 812 |
| AM11894-AS | asUfsasCfuCfcCfuUfcUfcAfuUfaGfgCfsa | 578 | AUACUCCCUUCUCAUUAGGCA | 813 |
| AM11895-AS | cPrpusGfsasUfgUfuUfuGfaGfcAfcCfuAfcUfsc | 579 | UGAUGUUUUGAGCACCUACUC | 796 |
| AM11897-AS | usGfsasuguuuugaGfcAfcCfuacusc | 580 | UGAUGUUUUGAGCACCUACUC | 796 |
| AM11898-AS | cPrpusGfsasuguuuugaGfcAfcCfuacusc | 581 | UGAUGUUUUGAGCACCUACUC | 796 |
| AM12234-AS | cPrpusUfscsCfaUfuCfcUfgUfuCfaUfuGfcCfsu | 582 | UUCCAUUCCUGUUCAUUGCCU | 797 |
| AM12236-AS | usUfscscauuccugUfuCfaUfugccsu | 583 | UUCCAUUCCUGUUCAUUGCCU | 797 |
| AM12237-AS | cPrpusUfscscauuccugUfuCfaUfugccsu | 584 | UUCCAUUCCUGUUCAUUGCCU | 797 |
| AM12240-AS | usUfscscauU_{UNA}ccugUfuCfaUfugccsu | 585 | UUCCAUUCCUGUUCAUUGCCU | 797 |
| AM12241-AS | usUfscscaU_{UNA}uccugUfuCfaUfugccsu | 586 | UUCCAUUCCUGUUCAUUGCCU | 797 |
| AM12245-AS | usUfscscauuccugUfuCfaUfugccsc | 587 | UUCCAUUCCUGUUCAUUGCCC | 814 |
| AM12593-AS | usGfsasuguuuugaGfcAfcCfuacusg | 588 | UGAUGUUUUGAGCACCUACUG | 815 |
| AM12594-AS | usGfsasuguU_{UNA}uugaGfcAfcCfuacusc | 589 | UGAUGUUUUGAGCACCUACUC | 796 |
| AM12596-AS | usGfsasuguuuugaGfcAfcCfuacusa | 590 | UGAUGUUUUGAGCACCUACUA | 816 |
| AM12755-AS | usUfscsCfaUfuccugUfuCfaUfuGfccsu | 591 | UUCCAUUCCUGUUCAUUGCCU | 797 |
| AM12756-AS | cPrpusUfscsCfaUfuccugUfuCfaUfuGfccsu | 592 | UUCCAUUCCUGUUCAUUGCCU | 797 |
| AM12757-AS | cPrpuUfcCfaUfuccugUfuCfaUfuGfccsu | 593 | UUCCAUUCCUGUUCAUUGCCU | 797 |
| AM14090-AS | usUfsgsUfguucaguUfuCfcAfuuccsg | 594 | UUGUGUUCAGUUUCCAUUCCG | 780 |
| AM14091-AS | usUfsgsuguUfcaguUfuCfcAfuuccsg | 595 | UUGUGUUCAGUUUCCAUUCCG | 780 |
| AM14093-AS | usGfsasUfguuuugaGfcAfcCfuacusc | 596 | UGAUGUUUUGAGCACCUACUC | 796 |
| AM14094-AS | usGfsasuguuuugaGfcAfcCfuAfcusc | 597 | UGAUGUUUUGAGCACCUACUC | 796 |
| AM14095-AS | usGfsasuguUfuugaGfcAfcCfuacusc | 598 | UGAUGUUUUGAGCACCUACUC | 796 |
| AM15021-AS | cPrpusUfsgsuguucaguUfuCfcAfuuccsa | 599 | UUGUGUUCAGUUUCCAUUCCA | 810 |
| AM15767-AS | cPrpusAfscsAfaUfuucugGfcUfuCfcCfagsg | 600 | UACAAUUUCUGGCUUCCCAGG | 817 |
| AM15770-AS | cPrpusCfsusGfuGfuucagUfuUfcCfaUfucsc | 601 | UCUGUGUUCAGUUUCCAUUCC | 781 |

TABLE 4
RAGE RNAi Agent Sense Strand Sequences (Shown Without Linkers, )
Conjugates, or Capping Moieties

| | | | Underlying Base Sequence | |
|---|---|---|---|---|
| | | SEQ | (5′ → 3′) (Shown as an | SEQ |
| | Modified Sense Strand | ID | Unmodified Nucleotide | ID |
| Strand ID | (5′ → 3′) | NO. | Sequence) | NO. |
| AM10307-SS-NL | csggaauggAfAfAfcugaacacaa | 602 | CGGAAUGGAAACUGAACACAA | 818 |
| AM10310-SS-NL | gsgaauggaAfAfCfugaacacaia | 603 | GGAAUGGAAACUGAACACAIA | 819 |
| AM10313-SS-NL | asccagauuCfCfUfgggaaiccaa | 604 | ACCAGAUUCCUGGGAAICCAA | 820 |
| AM10316-SS-NL | usccugggaAfGfCfcagaaauugu | 605 | UCCUGGGAAGCCAGAAAUUGU | 821 |
| AM10466-SS-NL | gsccacuggUfGfCfugaaguguaa | 606 | GCCACUGGUGCUGAAGUGUAA | 822 |
| AM10468-SS-NL | csggacagaAfGfCfuuggaagiua | 607 | CGGACAGAAGCUUGGAAGIUA | 823 |
| AM10470-SS-NL | csaggaugaGfGfGfgauuuuccia | 608 | CAGGAUGAGGGGAUUUUCCIA | 824 |
| AM10472-SS-NL | asgauuccuGfGfGfaagcuagaaa | 609 | AGAUUCCUGGGAAGCUAGAAA | 825 |
| AM10474-SS-NL | a_2NsgauucugCfCfUfcugaacucaa | 610 | (A^{2N})GAUUCUGCCUCUGAACUCAA | 826 |
| AM10476-SS-NL | usacccugcAfGfGfgacucuuaga | 611 | UACCCUGCAGGGACUCUUAGA | 827 |
| AM10478-SS-NL | ascccugcaGfGfGfacucuuaicu | 612 | ACCCUGCAGGGACUCUUAICU | 828 |
| AM10480-SS-NL | uscccaccuUfCfUfccuguaicuu | 613 | UCCCACCUUCUCCUGUAICUU | 829 |
| AM10482-SS-NL | asccuucucCfUfGfuagcuucaia | 614 | ACCUUCUCCUGUAGCUUCAIA | 830 |
| AM10570-SS-NL | gsgugcuggUfCfCfucagucuiua | 615 | GGUGCUGGUCCUCAGUCUIUA | 831 |
| AM10572-SS-NL | gsgugcuggUfCfCfucagucugua | 616 | GGUGCUGGUCCUCAGUCUGUA | 832 |
| AM10574-SS-NL | gsugcugguCfCfUfcagucuguia | 617 | GUGCUGGUCCUCAGUCUGUIA | 833 |
| AM10576-SS-NL | gsugcugguCfCfUfcagucuiuga | 618 | GUGCUGGUCCUCAGUCUIUGA | 834 |
| AM10644-SS-NL | csggaauggAfAfAfcugaacacaa | 619 | CGGAAUGGAAACUGAACACAA | 818 |
| AM10716-SS-NL | gsggaauggAfAfAfcugaacacaa | 620 | GGGAAUGGAAACUGAACACAA | 835 |
| AM10718-SS-NL | csggaauggAfAfAfcuiaacacaa | 621 | CGGAAUGGAAACUIAACACAA | 836 |
| AM10719-SS-NL | csggaauggAfa_2NAfcuiaacacaa | 622 | CGGAAUGGA(A^{2N})ACUIAACACAA | 866 |
| AM10721-SS-NL | csggaauggAfAfAfcugaauacaa | 623 | CGGAAUGGAAACUGAAUACAA | 837 |
| AM10725-SS-NL | csggaauGfgAfaAfcugaacacaa | 624 | CGGAAUGGAAACUGAACACAA | 818 |
| AM10737-SS-NL | usccugggaAfGfCfcagaaauugu | 625 | UCCUGGGAAGCCAGAAAUUGU | 821 |
| AM10751-SS-NL | gsaguagguGfCfUfcaaaacauca | 626 | GAGUAGGUGCUCAAAACAUCA | 838 |
| AM10753-SS-NL | asggcaaugAfAfCfaggaauigaa | 627 | AGGCAAUGAACAGGAAUIGAA | 839 |
| AM10755-SS-NL | asguccgugUfCfUfaccaiauuca | 628 | AGUCCGUGUCUACCAIAUUCA | 840 |
| AM10757-SS-NL | usccgugucUfAfCfcagauuccua | 629 | UCCGUGUCUACCAGAUUCCUA | 841 |
| AM10759-SS-NL | csccaccuuCfUfCfcuguaicuua | 630 | CCCACCUUCUCCUGUAICUUA | 842 |
| AM10761-SS-NL | csuccucaaAfUfCfcacuigauga | 631 | CUCCUCAAAUCCACUIGAUGA | 843 |
| AM10773-SS-NL | gsguagauuCfUfGfccucuiaacu | 632 | GGUAGAUUCUGCCUCUIAACU | 844 |
| AM10775-SS-NL | usagauucuGfCfCfucugaacuca | 633 | UAGAUUCUGCCUCUGAACUCA | 845 |
| AM10777-SS-NL | gsgcuggugUfUfCfccaauaaggu | 634 | GGCUGGUGUUCCCAAUAAGGU | 846 |
| AM10779-SS-NL | csugguguuCfCfCfaauaagiuga | 635 | CUGGUGUUCCCAAUAAGIUGA | 847 |
| AM10781-SS-NL | gscuuagcuGfGfCfacuuigauga | 636 | GCUUAGCUGGCACUUIGAUGA | 848 |
| AM10783-SS-NL | cscuaaugaGfAfAfgggaiuaucu | 637 | CCUAAUGAGAAGGGAIUAUCU | 849 |
| AM10785-SS-NL | gsugagaagGfGfAfguaucuiuga | 638 | GUGAGAAGGGAGUAUCUIUGA | 850 |
| AM10787-SS-NL | csagcaucaGfCfAfucauciaaca | 639 | CAGCAUCAGCAUCAUCIAACA | 851 |
| AM11105-SS-NL | cggaauggAfAfAfcugaacacaa | 640 | CGGAAUGGAAACUGAACACAA | 818 |
| AM11106-SS-NL | csggaauggAfAfAfcugaacacaa | 641 | CGGAAUGGAAACUGAACACAA | 818 |
| AM11107-SS-NL | cggaauggAfAfAfcugaacacaa | 642 | CGGAAUGGAAACUGAACACAA | 818 |
| AM11189-SS-NL | csggaauGfgAfaAfcugaauacaa | 643 | CGGAAUGGAAACUGAAUACAA | 837 |
| AM11193-SS-NL | gsggaauGfgAfaAfcugaacacaa | 644 | GGGAAUGGAAACUGAACACAA | 835 |
| AM11195-SS_NL | usggaauGfgAfaAfcugaacacaa | 645 | UGGAAUGGAAACUGAACACAA | 852 |
| AM11197-SS-NL | csggaauGfgAfa_2NAfcugaacacaa | 646 | CGGAAUGGA(A^{2N})ACUGAACACAA | 867 |
| AM11512-SS-NL | cggaauggAfAfAfcugaacacaa | 647 | CGGAAUGGAAACUGAACACAA | 818 |
| AM11513-SS-NL | csggaauggAfAfAfcugaacacaa | 648 | CGGAAUGGAAACUGAACACAA | 818 |
| AM11514-SS-NL | csggaauggAfAfAfcugaacacaa | 649 | CGGAAUGGAAACUGAACACAA | 818 |
| AM11515-SS-NL | cggaauggAfAfAfcugaacacaa | 650 | CGGAAUGGAAACUGAACACAA | 818 |
| AM11516-SS-NL | csggaauggAfAfAfcugaacacaa | 651 | CGGAAUGGAAACUGAACACAA | 818 |
| AM11517-SS-NL | cggaauggAfAfAfcugaacacaa | 652 | CGGAAUGGAAACUGAACACAA | 818 |
| AM11888-SS-NL | gsaugaacaGfGfAfauggaaagga | 653 | GAUGAACAGGAAUGGAAAGGA | 853 |
| AM11890-SS-NL | gsaugaacaGfGfAfauggaaagia | 654 | GAUGAACAGGAAUGGAAAGIA | 854 |
| AM11891-SS-NL | gsacuaccgAfGfUfccgugucuaa | 655 | GACUACCGAGUCCGUGUCUAA | 855 |
| AM11893-SS-NL | usgccuaauGfAfGfaagggaguau | 656 | UGCCUAAUGAGAAGGGAGUAU | 856 |
| AM11896-SS-NL | gsaguagguGfcUfcAfaaacauca | 657 | GAGUAGGUGCUCAAAACAUCA | 838 |
| AM11899-SS-NL | gsaguagiuGfcUfcAfaaacauca | 658 | GAGUAGIUGCUCAAAACAUCA | 857 |
| AM11900-SS-NL | gsaguagGfuGfcUfcaaaacauca | 659 | GAGUAGGUGCUCAAAACAUCA | 838 |
| AM11901-SS-NL | gsaguagguGfcUfcaaaacauca | 660 | GAGUAGGUGCUCAAAACAUCA | 838 |
| AM12235-SS-NL | asggcaaUfgAfaCfaggaauigaa | 661 | AGGCAAUGAACAGGAAUIGAA | 839 |
| AM12238-SS-NL | asggcaaUfgAfaCfaggaauggaa | 662 | AGGCAAUGAACAGGAAUGGAA | 858 |
| AM12239-SS-NL | asggcaaUfgAfaCfaggaaugiaa | 663 | AGGCAAUGAACAGGAAUGIAA | 859 |
| AM12242-SS-NL | asggcaaUfgAfaCfagiaauggaa | 664 | AGGCAAUGAACAGIAAUGGAA | 860 |
| AM12243-SS-NL | asggcaaUfgAfaCfaigaauggaa | 665 | AGGCAAUGAACAIGAAUGGAA | 861 |
| AM12244-SS-NL | gsggcaaUfgAfaCfaggaauigaa | 666 | GGGCAAUGAACAGGAAUIGAA | 862 |
| AM12592-SS-NL | csaguagGfuGfcUfcaaaacauca | 667 | CAGUAGGUGCUCAAAACAUCA | 863 |
| AM12595-SS-NL | usa_2NguagGfuGfcUfcaaaacauca | 668 | U(A^{2N})GUAGGUGCUCAAAACAUCA | 864 |
| AM12597-SS-NL | gsaguagguGfcUfCfaaaacauca | 669 | GAGUAGGUGCUCAAAACAUCA | 838 |
| AM12754-SS-NL | asggcaaugAfAfCfaggaauggaa | 670 | AGGCAAUGAACAGGAAUGGAA | 858 |
| AM12910-SS-NL | gsaguagGfuGfcUfcaaaacauca | 671 | GAGUAGGUGCUCAAAACAUCA | 838 |
| AM12911-SS-NL | asggcaaugAfAfCfaggaauigaa | 672 | AGGCAAUGAACAGGAAUIGAA | 839 |
| AM13987-SS-NL | csggaauggAfAfAfcugaacacaa | 673 | CGGAAUGGAAACUGAACACAA | 818 |
| AM14092-SS-NL | csggaauggAfaAfcUfgaacacaa | 674 | CGGAAUGGAAACUGAACACAA | 818 |
| AM15766-SS-NL | cscugggaaGfCfCfagaaauugua | 675 | CCUGGGAAGCCAGAAAUUGUA | 865 |
| AM16133-SS-NL | csggaauggAfAfAfcugaacacaa | 676 | CGGAAUGGAAACUGAACACAA | 818 |

(A^{2N}) = 2-aminoadenine-containing nucleotide; I = hypoxanthine (inosine) nucleotide

TABLE 5
RAGE RNAi Agent Sense Strand Sequences (Shown With TriAlk14 Linker
(see Table 11 for structure information)).

| | | | Underlying Base | |
|---|---|---|---|---|
| | | | Sequence | |
| | | SEQ | (5′ → 3′) (Shown | SEQ |
| | | ID | as an Unmodified | ID |
| Strand ID | Modified Sense Strand (5′ → 3′) | NO. | Nucleotide Sequence) | NO. |
| AM10307-SS | (TriAlk14)csggaauggAfAfAfcugaacacaas(invAb) | 677 | CGGAAUGGAAACUGAACACAA | 818 |
| AM10310-SS | (TriAlk14)gsgaauggaAfAfCfugaacacaias(invAb) | 678 | GGAAUGGAAACUGAACACAIA | 819 |
| AM10313-SS | (TriAlk14)asccagauuCfCfUfgggaaiccaas(invAb) | 679 | ACCAGAUUCCUGGGAAICCAA | 820 |
| AM10316-SS | (TriAlk14)usccugggaAfGfCfcagaaauugus(invAb) | 680 | UCCUGGGAAGCCAGAAAUUGU | 821 |
| AM10466-SS | (TriAlk14)gsccacuggUfGfCfugaaguguaas(invAb) | 681 | GCCACUGGUGCUGAAGUGUAA | 822 |
| AM10468-SS | (TriAlk14)csggacagaAfGfCfuuggaagiuas(invAb) | 682 | CGGACAGAAGCUUGGAAGIUA | 823 |
| AM10470-SS | (TriAlk14)csaggaugaGfGfGfgauuuuccias(invAb) | 683 | CAGGAUGAGGGGAUUUUCCIA | 824 |
| AM10472-SS | (TriAlk14)asgauuccuGfGfGfaagcuagaaas(invAb) | 684 | AGAUUCCUGGGAAGCUAGAAA | 825 |
| AM10474-SS | (TriAlk14)a_2NsgauucugCfCfUfcugaacucaas | 685 | (A^{2N})GAUUCUGCCUCUGAACU | 826 |
| | (invAb) | | CAA | |
| AM10476-SS | (TriAlk14)usacccugcAfGfGfgacucuuagas(invAb) | 686 | UACCCUGCAGGGACUCUUAGA | 827 |
| AM10478-SS | (TriAlk14)ascccugcaGfGfGfacucuuaicus(invAb) | 687 | ACCCUGCAGGGACUCUUAICU | 828 |
| AM10480-SS | (TriAlk14)uscccaccuUfCfUfccuguaicuus(invAb) | 688 | UCCCACCUUCUCCUGUAICUU | 829 |
| AM10482-SS | (TriAlk14)asccuucucCfUfGfuagcuucaias(invAb) | 689 | ACCUUCUCCUGUAGCUUCAIA | 830 |
| AM10570-SS | (TriAlk14)gsgugcuggUfCfCfucagucuiuas(invAb) | 690 | GGUGCUGGUCCUCAGUCUIUA | 831 |
| AM10572-SS | (TriAlk14)gsgugcuggUfCfCfucagucuguas(invAb) | 691 | GGUGCUGGUCCUCAGUCUGUA | 832 |
| AM10574-SS | (TriAlk14)gsugcugguCfCfUfcagucuguias(invAb) | 692 | GUGCUGGUCCUCAGUCUGUIA | 833 |
| AM10576-SS | (TriAlk14)gsugcugguCfCfUfcagucuiugas(invAb) | 693 | GUGCUGGUCCUCAGUCUIUGA | 834 |
| AM10644-SS | (TriAlk14)csggaauggAfAfAfcugaacacaas(invAb) | 694 | CGGAAUGGAAACUGAACACAA | 818 |
| AM10716-SS | (TriAlk14)gsggaauggAfAfAfcugaacacaas(invAb) | 695 | GGGAAUGGAAACUGAACACAA | 835 |
| AM10718-SS | (TriAlk14)csggaauggAfAfAfcuiaacacaas(invAb) | 696 | CGGAAUGGAAACUIAACACAA | 836 |
| AM10719-SS | (TriAlk14)csggaauggAfa_2NAfcuiaacacaas | 697 | CGGAAUGGA(A^{2N})ACUIAACA | 866 |
| | (invAb) | | CAA | |
| AM10721-SS | (TriAlk14)csggaauggAfAfAfcugaauacaas(invAb) | 698 | CGGAAUGGAAACUGAAUACAA | 837 |
| AM10725-SS | (TriAlk14)csggaauGfgAfaAfcugaacacaas(invAb) | 699 | CGGAAUGGAAACUGAACACAA | 818 |
| AM10737-SS | (TriAlk14)usccugggaAfGfCfcagaaauugus(invAb) | 700 | UCCUGGGAAGCCAGAAAUUGU | 821 |
| AM10751-SS | (TriAlk14)gsaguagguGfCfUfcaaaacaucas(invAb) | 701 | GAGUAGGUGCUCAAAACAUCA | 838 |
| AM10753-SS | (TriAlk14)asggcaaugAfAfCfaggaauigaas(invAb) | 702 | AGGCAAUGAACAGGAAUIGAA | 839 |
| AM10755-SS | (TriAlk14)asguccgugUfCfUfaccaiauucas(invAb) | 703 | AGUCCGUGUCUACCAIAUUCA | 840 |
| AM10757-SS | (TriAlk14)usccgugucUfAfCfcagauuccuas(invAb) | 704 | UCCGUGUCUACCAGAUUCCUA | 841 |
| AM10759-SS | (TriAlk14)csccaccuuCfUfCfcuguaicuuas(invAb) | 705 | CCCACCUUCUCCUGUAICUUA | 842 |
| AM10761-SS | (TriAlk14)csuccucaaAfUfCfcacuigaugas(invAb) | 706 | CUCCUCAAAUCCACUIGAUGA | 843 |
| AM10773-SS | (TriAlk14)gsguagauuCfUfGfccucuiaacus(invAb) | 707 | GGUAGAUUCUGCCUCUIAACU | 844 |
| AM10775-SS | (TriAlk14)usagauucuGfCfCfucugaacucas(invAb) | 708 | UAGAUUCUGCCUCUGAACUCA | 845 |
| AM10777-SS | (TriAlk14)gsgcuggugUfUfCfccaauaaggus(invAb) | 709 | GGCUGGUGUUCCCAAUAAGGU | 846 |
| AM10779-SS | (TriAlk14)csugguguuCfCfCfaauaagiugas(invAb) | 710 | CUGGUGUUCCCAAUAAGIUGA | 847 |
| AM10781-SS | (TriAlk14)gscuuagcuGfGfCfacuuigaugas(invAb) | 711 | GCUUAGCUGGCACUUIGAUGA | 848 |
| AM10783-SS | (TriAlk14)cscuaaugaGfAfAfgggaiuaucus(invAb) | 712 | CCUAAUGAGAAGGGAIUAUCU | 849 |
| AM10785-SS | (TriAlk14)gsugagaagGfGfAfguaucuiugas(invAb) | 713 | GUGAGAAGGGAGUAUCUIUGA | 850 |
| AM10787-SS | (TriAlk14)csagcaucaGfCfAfucauciaacas(invAb) | 714 | CAGCAUCAGCAUCAUCIAACA | 851 |
| AM11105-SS | (TriAlk14)cggaauggAfAfAfcugaacacaas(invAb) | 715 | CGGAAUGGAAACUGAACACAA | 818 |
| AM11106-SS | (TriAlk14)csggaauggAfAfAfcugaacacaa(invAb) | 716 | CGGAAUGGAAACUGAACACAA | 818 |
| AM11107-SS | (TriAlk14)cggaauggAfAfAfcugaacacaa(invAb) | 717 | CGGAAUGGAAACUGAACACAA | 818 |
| AM11189-SS | (TriAlk14)csggaauGfgAfaAfcugaauacaas(invAb) | 718 | CGGAAUGGAAACUGAAUACAA | 837 |
| AM11193-SS | (TriAlk14)gsggaauGfgAfaAfcugaacacaas(invAb) | 719 | GGGAAUGGAAACUGAACACAA | 835 |
| AM11195-SS | (TriAlk14)usggaauGfgAfaAfcugaacacaas(invAb) | 720 | UGGAAUGGAAACUGAACACAA | 852 |
| AM11197-SS | (TriAlk14)csggaauGfgAfa_2NAfcugaacacaas | 721 | CGGAAUGGA(A^{2N})ACUGAACA | 867 |
| | (invAb) | | CAA | |
| AM11512-SS | (TriAlk14)cggaauggAfAfAfcugaacacaas(invAb) | 722 | CGGAAUGGAAACUGAACACAA | 818 |
| AM11513-SS | (TriAlk14)csggaauggAfAfAfcugaacacaas(invAb) | 723 | CGGAAUGGAAACUGAACACAA | 818 |
| AM11514-SS | (TriAlk14)csggaauggAfAfAfcugaacacaas(invAb) | 724 | CGGAAUGGAAACUGAACACAA | 818 |
| AM11515-SS | (TriAlk14)cggaauggAfAfAfcugaacacaas(invAb) | 725 | CGGAAUGGAAACUGAACACAA | 818 |
| AM11516-SS | (TriAlk14)csggaauggAfAfAfcugaacacaas(invAb) | 726 | CGGAAUGGAAACUGAACACAA | 818 |
| AM11517-SS | (TriAlk14)cggaauggAfAfAfcugaacacaas(invAb) | 727 | CGGAAUGGAAACUGAACACAA | 818 |
| AM11888-SS | (TriAlk14)gsaugaacaGfGfAfauggaaaggas(invAb) | 728 | GAUGAACAGGAAUGGAAAGGA | 853 |
| AM11890-SS | (TriAlk14)gsaugaacaGfGfAfauggaaagias(invAb) | 729 | GAUGAACAGGAAUGGAAAGIA | 854 |
| AM11891-SS | (TriAlk14)gsacuaccgAfGfUfccgugucuaas(invAb) | 730 | GACUACCGAGUCCGUGUCUAA | 855 |
| AM11893-SS | (TriAlk14)usgccuaauGfAfGfaagggaguaus(invAb) | 731 | UGCCUAAUGAGAAGGGAGUAU | 856 |
| AM11896-SS | (TriAlk14)gsaguagguGfcUfcAfaaacaucas(invAb) | 732 | GAGUAGGUGCUCAAAACAUCA | 838 |
| AM11899-SS | (TriAlk14)gsaguagiuGfcUfcAfaaacaucas(invAb) | 733 | GAGUAGIUGCUCAAAACAUCA | 857 |
| AM11900-SS | (TriAlk14)gsaguagGfuGfcUfcaaaacaucas(invAb) | 734 | GAGUAGGUGCUCAAAACAUCA | 838 |
| AM11901-SS | (TriAlk14)gsaguagguGfcUfcaaaacaucas(invAb) | 735 | GAGUAGGUGCUCAAAACAUCA | 838 |
| AM12235-SS | (TriAlk14)asggcaaUfgAfaCfaggaauigaas(invAb) | 736 | AGGCAAUGAACAGGAAUIGAA | 839 |
| AM12238-SS | (TriAlk14)asggcaaUfgAfaCfaggaauggaas(invAb) | 737 | AGGCAAUGAACAGGAAUGGAA | 858 |
| AM12239-SS | (TriAlk14)asggcaaUfgAfaCfaggaaugiaas(invAb) | 738 | AGGCAAUGAACAGGAAUGIAA | 859 |
| AM12242-SS | (TriAlk14)asggcaaUfgAfaCfagiaauggaas(invAb) | 739 | AGGCAAUGAACAGIAAUGGAA | 860 |
| AM12243-SS | (TriAlk14)asggcaaUfgAfaCfaigaauggaas(invAb) | 740 | AGGCAAUGAACAIGAAUGGAA | 861 |
| AM12244-SS | (TriAlk14)gsggcaaUfgAfaCfaggaauigaas(invAb) | 741 | GGGCAAUGAACAGGAAUIGAA | 862 |
| AM12592-SS | (TriAlk14)csaguagGfuGfcUfcaaaacaucas(invAb) | 742 | CAGUAGGUGCUCAAAACAUCA | 863 |
| AM12595-SS | (TriAlk14)usa_2NguagGfuGfcUfcaaaacaucas | 743 | U(A^{2N})GUAGGUGCUCAAAACA | 864 |
| | (invAb) | | UCA | |
| AM12597-SS | (TriAlk14)gsaguagguGfcUfCfaaaacaucas(invAb) | 744 | GAGUAGGUGCUCAAAACAUCA | 838 |
| AM12754-SS | (TriAlk14)asggcaaugAfAfCfaggaauggaas(invAb) | 745 | AGGCAAUGAACAGGAAUGGAA | 858 |
| AM12910-SS | (TriAlk14)gsaguagGfuGfcUfcaaaacaucas(invAb) | 746 | GAGUAGGUGCUCAAAACAUCA | 838 |
| AM12911-SS | (TriAlk14)asggcaaugAfAfCfaggaauigaas(invAb) | 747 | AGGCAAUGAACAGGAAUIGAA | 839 |
| AM13987-SS | (TriAlk14)csggaauggAfAfAfcugaacacaas(invAb) | 748 | CGGAAUGGAAACUGAACACAA | 818 |
| AM14092-SS | (TriAlk14)csggaauggAfaAfcUfgaacacaas(invAb) | 749 | CGGAAUGGAAACUGAACACAA | 818 |
| AM15766-SS | (TriAlk14)cscugggaaGfCfCfagaaauuguas(invAb) | 750 | CCUGGGAAGCCAGAAAUUGUA | 865 |
| AM16133-SS | (TriAlk14)scsggaauggAfAfAfcugaacacaas(invAb) | 751 | CGGAAUGGAAACUGAACACAA | 818 |

(A^{2N}) = 2-aminoadenine-containing nucleotide; I = hypoxanthine (inosine) nucleotide

TABLE 6
RAGE RNAi Agent Sense Strand Sequences (Shown
with Targeting Ligand Conjugate. The structure
of αvß6-SM6.1 is shown in Table 11, and the
structure of Tri-SM6.1-αvß6-(TA14) is shown
in FIG. 1.)

| | | | Corresponding |
|---|---|---|---|
| | | | Sense |
| | | | Strand |
| | | | AM Number |
| | | | Without |
| | Modified Sense | SEQ | Linker |
| Strand | Strand | ID | or Conjugate |
| ID | (5′ → 3′) | NO. | (See Table 4) |
| CS000363 | Tri-SM6.1-αvß6-(TA14) | 752 | AM10307-SS-NL |
| | csggaauggAfAfAfcugaac | | |
| | acaas(invAb) | | |
| CS000368 | Tri-SM6.1-αvß6-(TA14) | 753 | AM11105-SS-NL |
| | cggaauggAfAfAfcugaaca | | |
| | caas(invAb) | | |
| CS000369 | Tri-SM6.1-αvß6-(TA14) | 754 | AM11106-SS-NL |
| | csggaauggAfAfAfcugaac | | |
| | acaa(invAb) | | |
| CS000386 | Tri-SM6.1-αvß6-(TA14) | 755 | AM11107-SS-NL |
| | cggaauggAfAfAfcugaaca | | |
| | caa(invAb) | | |
| CS000497 | Tri-SM6.1-αvß6-(TA14) | 756 | AM11189-SS-NL |
| | csggaauGfgAfaAfcugaau | | |
| | acaas(invAb) | | |
| CS000499 | Tri-SM6.1-αvß6-(TA14) | 757 | AM10725-SS-NL |
| | csggaauGfgAfaAfcugaac | | |
| | acaas(invAb) | | |
| CS000503 | Tri-SM6.1-αvß6-(TA14) | 758 | AM11193-SS-NL |
| | gsggaauGfgAfaAfcugaac | | |
| | acaas(invAb) | | |
| CS000505 | Tri-SM6.1-αvß6-(TA14) | 759 | AM11195-SS-NL |
| | usggaauGfgAfaAfcugaac | | |
| | acaas(invAb) | | |
| CS000507 | Tri-SM6.1-αvß6-(TA14) | 760 | AM11197-SS-NL |
| | csggaauGfgAfa_ | | |
| | 2NAfcugaacacaas(invAb) | | |
| CS000531 | Tri-SM6.1-αvß6-(TA14) | 761 | AM10721-SS-NL |
| | csggaauggAfAfAfcugaau | | |
| | acaas(invAb) | | |
| CS000672 | αvß6-SM6.1-L6-C6- | 762 | AM11514-SS-NL |
| | csggaauggAfAfAfcugaac | | |
| | acaas(invAb) | | |
| CS000673 | αvß6-SM6.1-L6-C6s- | 763 | AM11515-SS-NL |
| | (invAb)scggaauggAfAfA | | |
| | fcugaacacaas(invAb) | | |
| CS000674 | αvß6-SM6.1-Alk-cyHex- | 764 | AM11516-SS-NL |
| | csggaauggAfAfAfcugaaca | | |
| | caas(invAb) | | |
| CS000675 | αvß6-SM6.1-Alk-cyHexs- | 765 | AM11517-SS-NL |
| | (invAb)scggaauggAfAfAf | | |
| | cugaacacaas(invAb) | | |
| CS000690 | αvß6-pep1-C6- | 766 | AM11514-SS-NL |
| | csggaauggAfAfAfcugaac | | |
| | acaas(invAb) | | |
| CS000691 | αvß6-pep1-C6s-(invAb) | 767 | AM11515-SS-NL |
| | scggaauggAfAfAfcugaac | | |
| | acaas(invAb) | | |
| CS000986 | Tri-SM6.1-αvß6-(TA14) | 768 | AM10716-SS-NL |
| | gsggaauggAfAfAfcugaac | | |
| | acaas(invAb) | | |
| CS000988 | Tri-SM6.1-αvß6-(TA14) | 769 | AM10718-SS-NL |
| | csggaauggAfAfAfcuiaac | | |
| | acaas(invAb) | | |
| CS000989 | Tri-SM6.1-αvß6-(TA14) | 770 | AM10719-SS-NL |
| | csggaauggAfa_2NAfcuia | | |
| | acacaas(invAb) | | |
| CS001021 | Tri-SM6.1-αvß6-(TA14) | 771 | AM10310-SS-NL |
| | gsgaauggaAfAfCfugaaca | | |
| | caias(invAb) | | |
| CS001024 | Tri-SM6.1-αvß6-(TA14) | 772 | AM10313-SS-NL |
| | asccagauuCfCfUfgggaai | | |
| | ccaas(invAb) | | |
| CS001027 | Tri-SM6.1-αvß6-(TA14) | 773 | AM10316-SS-NL |
| | usccugggaAfGfCfcagaaa | | |
| | uugus(invAb) | | |
| CS001579 | Tri-SM6.1-αvß6-(TA14) | 774 | AM12910-SS-NL |
| | gsaguagGfuGfcUfcaaaac | | |
| | aucas(invAb) | | |
| CS001582 | Tri-SM6.1-αvß6-(TA14) | 775 | AM12911-SS-NL |
| | asggcaaugAfAfCfaggaau | | |
| | igaas(invAb) | | |
| CS002138 | Tri-SM6.1-αvß6-(TA14) | 776 | AM14092-SS-NL |
| | csggaauggAfaAfcUfgaac | | |
| | acaas(invAb) | | |
| CS002399 | Tri-SM6.1-αvß6-(TA14) | 777 | AM12910-SS-NL |
| | gsaguagGfuGfcUfcaaaac | | |
| | auca(invAb) | | |
| CS002976 | Tri-SM6.1-αvß6-(TA14) | 778 | AM15766-SS-NL |
| | cscugggaaGfCfCfagaaau | | |
| | uguas(invAb) | | |
| CS003048 | Tri-SM6.1-αvß6-(TA14) | 779 | AM10307-SS-NL |
| | scsggaauggAfAfAfcugaa | | |
| | cacaas(invAb) | | |

[0178] The RAGE RNAi agents disclosed herein are formed by annealing an antisense strand with a sense strand. A sense strand containing a sequence listed in Table 2, Table 4, Table 5, or Table 6 can be hybridized to any antisense strand containing a sequence listed in Table 2 or Table 3, provided the two sequences have a region of at least 85% complementarity over a contiguous 15, 16, 17, 18, 19, 20, or 21 nucleotide sequence.

[0179] As shown in Table 5 above, certain of the example RAGE RNAi agent nucleotide sequences are shown to further include reactive linking groups at one or both of the 5′ terminal end and the 3′ terminal end of the sense strand. For example, many of the RAGE RNAi agent sense strand sequences shown in Table 5 above have a (TriAlk14) linking group at the 5′ end of the nucleotide sequence. Other linking groups, such as an (NH2-C6) linking group or a (6-SS-6) or (C6-SS-C6) linking group, may be present as well or alternatively in certain embodiments. Such reactive linking groups are positioned to facilitate the linking of targeting ligands, targeting groups, and/or PK/PD modulators to the RAGE RNAi agents disclosed herein. Linking or conjugation reactions are well known in the art and provide for formation of covalent linkages between two molecules or reactants. Suitable conjugation reactions for use in the scope of the inventions herein include, but are not limited to, amide coupling reaction, Michael addition reaction, hydrazone formation reaction, inverse-demand Diels-Alder cycloaddition reaction, oxime ligation, and Copper (I)-catalyzed or strain-promoted azide-alkyne cycloaddition reaction cycloaddition reaction.

[0180] In some embodiments, targeting ligands, such as the integrin targeting ligands shown in the examples and figures disclosed herein, can be synthesized as activated esters, such as tetrafluorophenyl (TFP) esters, which can be displaced by a reactive amino group (e.g., NH₂-C₆) to attach the targeting ligand to the RAGE RNAi agents disclosed herein. In some embodiments, targeting ligands are synthesized as azides, which can be conjugated to a propargyl (e.g., TriAlk14) or DBCO group, for example, via Copper (I)-catalyzed or strain-promoted azide-alkyne cycloaddition reaction.

[0181] Additionally, certain of the nucleotide sequences can be synthesized with a dT nucleotide at the 3′ terminal end of the sense strand, followed by (3′→5′) a linker (e.g., C6-SS-C6). The linker can, in some embodiments, facilitate the linkage to additional components, such as, for example, a PK/PD modulator or one or more targeting ligands. As described herein, the disulfide bond of C6-SS-C6 is first reduced, removing the dT from the molecule, which can then facilitate the conjugation of the desired PK/PD modulator. The terminal dT nucleotide therefore is not a part of the fully conjugated construct.

[0182] In some embodiments, the antisense strand of a RAGE RNAi agent disclosed herein differs by 0, 1, 2, or 3 nucleotides from any of the antisense strand sequences in Table 3 or Table 10. In some embodiments, the sense strand of a RAGE RNAi agent disclosed herein differs by 0, 1, 2, or 3 nucleotides from any of the sense strand sequences in Table 4, Table 5, Table 6, or Table 10.

[0183] In some embodiments, a RAGE RNAi agent antisense strand comprises a nucleotide sequence of any of the sequences in Table 2 or Table 3. In some embodiments, a RAGE RNAi agent antisense strand comprises the sequence of nucleotides (from 5′ end→3′ end) 1-17, 2-17, 1-18, 2-18, 1-19, 2-19, 1-20, 2-20, 1-21, 2-21, 1-22, 2-22, 1-23, 2-23, 1-24, or 2-24 of any of the sequences in Table 2, Table 3, or Table 10. In certain embodiments, a RAGE RNAi agent antisense strand comprises or consists of a modified sequence of any one of the modified sequences in Table 3 or Table 10.

[0184] In some embodiments, a RAGE RNAi agent sense strand comprises the nucleotide sequence of any of the sequences in Table 2 or Table 4. In some embodiments, a RAGE RNAi agent sense strand comprises the sequence of nucleotides (from 5′ end→3′ end) 1-17, 2-17, 3-17, 4-17, 1-18, 2-18, 3-18, 4-18, 1-19, 2-19, 3-19, 4-19, 1-20, 2-20, 3-20, 4-20, 1-21, 2-21, 3-21, 4-21, 1-22, 2-22, 3-22, 4-22, 1-23, 2-23, 3-23, 4-23, 1-24, 2-24, 3-24, or 4-24, of any of the sequences in Table 2, Table 4, Table 5, Table 6, or Table 10. In certain embodiments, a RAGE RNAi agent sense strand comprises or consists of a modified sequence of any one of the modified sequences in Table 3 or Table 10.

[0185] For the RNAi agents disclosed herein, the nucleotide at position 1 of the antisense strand (from 5′ end→3′ end) can be perfectly complementary to an AGER gene, or can be non-complementary to an AGER gene. In some embodiments, the nucleotide at position 1 of the antisense strand (from 5′ end→3′ end) is a U, A, or dT (or a modified version of U, A or dT). In some embodiments, the nucleotide at position 1 of the antisense strand (from 5′ end→3′ end) forms an A:U or U:A base pair with the sense strand.

[0186] In some embodiments, a RAGE RNAi agent antisense strand comprises the sequence of nucleotides (from 5′ end→3′ end) 2-18 or 2-19 of any of the antisense strand sequences in Table 2, Table 3, or Table 10. In some embodiments, a RAGE RNAi sense strand comprises the sequence of nucleotides (from 5′ end→3′ end) 1-17 or 1-18 of any of the sense strand sequences in Table 2, Table 4, Table 5, Table 6, or Table 10.

[0187] In some embodiments, a RAGE RNAi agent includes (i) an antisense strand comprising the sequence of nucleotides (from 5′ end→3′ end) 2-18 or 2-19 of any of the antisense strand sequences in Table 2, Table 3, or Table 10, and (ii) a sense strand comprising the sequence of nucleotides (from 5′ end→3′ end) 1-17 or 1-18 of any of the sense strand sequences in Table 2, Table 4, Table 5, Table 6, or Table 10.

[0188] A sense strand containing a sequence listed in Table 2 or Table 4 can be hybridized to any antisense strand containing a sequence listed in Table 2 or Table 3 provided the two sequences have a region of at least 85% complementarity over a contiguous 16, 17, 18, 19, 20, or 21 nucleotide sequence. In some embodiments, the RAGE RNAi agent has a sense strand consisting of the modified sequence of any of the modified sequences in Table 4, Table 5, Table 6, or Table 10, and an antisense strand consisting of the modified sequence of any of the modified sequences in Table 3 or Table 10. Certain representative sequence pairings are exemplified by the Duplex ID Nos. shown in Tables 7A, 73, 8, 9A and 9B.

[0189] In some embodiments, a RAGE RNAi agent comprises, consists of, or consists essentially of a duplex represented by any one of the Duplex ID Nos. presented herein. In some embodiments, a RAGE RNAi agent consists of any of the Duplex ID Nos. presented herein. In some embodiments, a RAGE RNAi agent comprises the sense strand and antisense strand nucleotide sequences of any of the Duplex ID Nos. presented herein. In some embodiments, a RAGE RNAi agent comprises the sense strand and antisense strand nucleotide sequences of any of the Duplex ID Nos. presented herein and a targeting group, linking group, and/or other non-nucleotide group wherein the targeting group, linking group, and/or other non-nucleotide group is covalently linked (i.e., conjugated) to the sense strand or the antisense strand. In some embodiments, a RAGE RNAi agent includes the sense strand and antisense strand modified nucleotide sequences of any of the Duplex ID Nos. presented herein. In some embodiments, a RAGE RNAi agent comprises the sense strand and antisense strand modified nucleotide sequences of any of the Duplex ID Nos. presented herein and a targeting group, linking group, and/or other non-nucleotide group, wherein the targeting group, linking group, and/or other non-nucleotide group is covalently linked to the sense strand or the antisense strand.

[0190] In some embodiments, a RAGE RNAi agent comprises an antisense strand and a sense strand having the nucleotide sequences of any of the antisense strand/sense strand duplexes of Tables 2, 7A, 73, 8, 9A, 9B, or 10, and comprises a targeting group. In some embodiments, a RAGE RNAi agent comprises an antisense strand and a sense strand having the nucleotide sequences of any of the antisense strand/sense strand duplexes of Tables 2, 7A, 7B, 8, 9A, 9B, or 10, and comprises one or more αvβ6 integrin targeting ligands.

[0191] In some embodiments, a RAGE RNAi agent comprises an antisense strand and a sense strand having the nucleotide sequences of any of the antisense strand/sense strand duplexes of Tables 2, 7A, 7B, 8, 9A, 9B, or 10, and comprises a targeting group that is an integrin targeting ligand. In some embodiments, a RAGE RNAi agent comprises an antisense strand and a sense strand having the nucleotide sequences of any of the antisense strand/sense strand duplexes of Tables 2, 7A, 7B, 8, 9A, 9B, or 10, and comprises one or more αvβ6 integrin targeting ligands or clusters of αvβ6 integrin targeting ligands (e.g., a tridentate αvβ6 integrin targeting ligand).

[0192] In some embodiments, a RAGE RNAi agent comprises an antisense strand and a sense strand having the modified nucleotide sequences of any of the antisense strand/sense strand duplexes of Tables 7A, 7B, 8, 9A, 9B, and 10.

[0193] In some embodiments, a RAGE RNAi agent comprises an antisense strand and a sense strand having the modified nucleotide sequences of any of the antisense strand/sense strand duplexes of Tables 7A, 7B, 8, 9A, 9B, and 10, and comprises an integrin targeting ligand.

[0194] In some embodiments, a RAGE RNAi agent comprises, consists of, or consists essentially of any of the duplexes of Tables 7A, 7B, 8, 9A, 9B, and 10.

TABLE 7A
RAGE RNAi Agent Duplexes with Corresponding Sense and
Antisense Strand ID Numbers and Sequence ID numbers for the
modified and unmodified nucleotide sequences. (Shown without
Linking Agents or Conjugates)

| | AS | AS | | SS | SS |
|---|---|---|---|---|---|
| | modi- | un- | | modi- | un- |
| | fied | modi- | | fied | modi- |
| | SEQ | fied | | SEQ | fied |
| | ID | SEQ ID | | ID | SEQ |
| AS ID | NO: | NO: | SS ID | NO: | ID NO: |
| AM10308-AS | 521 | 780 | AM10307-SS-NL | 602 | 818 |
| AM10309-AS | 522 | 780 | AM10307-SS-NL | 602 | 818 |
| AM10311-AS | 523 | 781 | AM10310-SS-NL | 603 | 819 |
| AM10312-AS | 524 | 781 | AM10310-SS-NL | 603 | 819 |
| AM10314-AS | 525 | 782 | AM10313-SS-NL | 604 | 820 |
| AM10315-AS | 526 | 782 | AM10313-SS-NL | 604 | 820 |
| AM10317-AS | 527 | 783 | AM10316-SS-NL | 605 | 821 |
| AM10318-AS | 528 | 783 | AM10316-SS-NL | 605 | 821 |
| AM10467-AS | 529 | 784 | AM10466-SS-NL | 606 | 822 |
| AM10469-AS | 530 | 785 | AM10468-SS-NL | 607 | 823 |
| AM10471-AS | 531 | 786 | AM10470-SS-NL | 608 | 824 |
| AM10473-AS | 532 | 787 | AM10472-SS-NL | 609 | 825 |
| AM10475-AS | 533 | 788 | AM10474-SS-NL | 610 | 826 |
| AM10477-AS | 534 | 789 | AM10476-SS-NL | 611 | 827 |
| AM10479-AS | 535 | 790 | AM10478-SS-NL | 612 | 828 |
| AM10481-AS | 536 | 791 | AM10480-SS-NL | 613 | 829 |
| AM10483-AS | 537 | 792 | AM10482-SS-NL | 614 | 830 |
| AM10571-AS | 538 | 793 | AM10570-SS-NL | 615 | 831 |
| AM10573-AS | 539 | 793 | AM10572-SS-NL | 616 | 832 |
| AM10575-AS | 540 | 794 | AM10574-SS-NL | 617 | 833 |
| AM10575-AS | 540 | 794 | AM10576-SS-NL | 618 | 834 |
| AM10308-AS | 521 | 780 | AM10644-SS-NL | 619 | 818 |
| AM10717-AS | 541 | 795 | AM10716-SS-NL | 620 | 835 |
| AM10308-AS | 521 | 780 | AM10718-SS-NL | 621 | 836 |
| AM10308-AS | 521 | 780 | AM10719-SS-NL | 622 | 866 |
| AM10720-AS | 542 | 780 | AM10307-SS-NL | 602 | 818 |
| AM10308-AS | 521 | 780 | AM10721-SS-NL | 623 | 837 |
| AM10722-AS | 543 | 780 | AM10307-SS-NL | 602 | 818 |
| AM10723-AS | 544 | 780 | AM10307-SS-NL | 602 | 818 |
| AM10724-AS | 545 | 780 | AM10307-SS-NL | 602 | 818 |
| AM10723-AS | 544 | 780 | AM10725-SS-NL | 624 | 818 |
| AM10317-AS | 527 | 783 | AM10737-SS-NL | 625 | 821 |
| AM10752-AS | 546 | 796 | AM10751-SS-NL | 626 | 838 |
| AM10754-AS | 547 | 797 | AM10753-SS-NL | 627 | 839 |
| AM10756-AS | 548 | 798 | AM10755-SS-NL | 628 | 840 |
| AM10758-AS | 549 | 799 | AM10757-SS-NL | 629 | 841 |
| AM10760-AS | 550 | 800 | AM10759-SS-NL | 630 | 842 |
| AM10762-AS | 551 | 801 | AM10761-SS-NL | 631 | 843 |
| AM10774-AS | 552 | 802 | AM10773-SS-NL | 632 | 844 |
| AM10776-AS | 553 | 803 | AM10775-SS-NL | 633 | 845 |
| AM10778-AS | 554 | 804 | AM10777-SS-NL | 634 | 846 |
| AM10780-AS | 555 | 805 | AM10779-SS-NL | 635 | 847 |
| AM10782-AS | 556 | 806 | AM10781-SS-NL | 636 | 848 |
| AM10784-AS | 557 | 807 | AM10783-SS-NL | 637 | 849 |
| AM10786-AS | 558 | 808 | AM10785-SS-NL | 638 | 850 |
| AM10788-AS | 559 | 809 | AM10787-SS-NL | 639 | 851 |
| AM11103-AS | 560 | 780 | AM10307-SS-NL | 602 | 818 |
| AM11104-AS | 561 | 780 | AM10307-SS-NL | 602 | 818 |
| AM11104-AS | 561 | 780 | AM11105-SS-NL | 640 | 818 |
| AM11104-AS | 561 | 780 | AM11106-SS-NL | 641 | 818 |
| AM11104-AS | 561 | 780 | AM11107-SS-NL | 642 | 818 |
| AM10309-AS | 522 | 780 | AM10721-SS-NL | 623 | 837 |
| AM11188-AS | 562 | 780 | AM10725-SS-NL | 624 | 818 |
| AM10723-AS | 544 | 780 | AM11189-SS-NL | 643 | 837 |
| AM11188-AS | 562 | 780 | AM11189-SS-NL | 643 | 837 |
| AM11190-AS | 563 | 780 | AM10725-SS-NL | 624 | 818 |
| AM11191-AS | 564 | 780 | AM10725-SS-NL | 624 | 818 |
| AM11192-AS | 565 | 780 | AM10725-SS-NL | 624 | 818 |
| AM11194-AS | 566 | 795 | AM11193-SS-NL | 644 | 835 |
| AM11196-AS | 567 | 810 | AM11195-SS-NL | 645 | 852 |
| AM10723-AS | 544 | 780 | AM11197-SS-NL | 646 | 867 |
| AM10309-AS | 522 | 780 | AM11512-SS-NL | 647 | 818 |
| AM10309-AS | 522 | 780 | AM11513-SS-NL | 648 | 818 |
| AM10309-AS | 522 | 780 | AM11514-SS-NL | 649 | 818 |
| AM10309-AS | 522 | 780 | AM11515-SS-NL | 650 | 818 |
| AM10309-AS | 522 | 780 | AM11516-SS-NL | 651 | 818 |
| AM10309-AS | 522 | 780 | AM11517-SS-NL | 652 | 818 |
| AM11757-AS | 568 | 780 | AM10725-SS-NL | 624 | 818 |
| AM11758-AS | 569 | 780 | AM10725-SS-NL | 624 | 818 |
| AM11759-AS | 570 | 795 | AM11193-SS-NL | 644 | 835 |
| AM11760-AS | 571 | 795 | AM11193-SS-NL | 644 | 835 |
| AM11761-AS | 572 | 795 | AM11193-SS-NL | 644 | 835 |
| AM11762-AS | 573 | 780 | AM10725-SS-NL | 624 | 818 |
| AM11763-AS | 574 | 795 | AM11193-SS-NL | 644 | 835 |
| AM11764-AS | 575 | 795 | AM11193-SS-NL | 644 | 835 |
| AM11889-AS | 576 | 811 | AM11888-SS-NL | 653 | 853 |
| AM11889-AS | 576 | 811 | AM11890-SS-NL | 654 | 854 |
| AM11892-AS | 577 | 812 | AM11891-SS-NL | 655 | 855 |
| AM11894-AS | 578 | 813 | AM11893-SS-NL | 656 | 856 |
| AM11895-AS | 579 | 796 | AM10751-SS-NL | 626 | 838 |
| AM11897-AS | 580 | 796 | AM11896-SS-NL | 657 | 838 |
| AM11898-AS | 581 | 796 | AM11896-SS-NL | 657 | 838 |
| AM11898-AS | 581 | 796 | AM11899-SS-NL | 658 | 857 |
| AM11897-AS | 580 | 796 | AM11900-SS-NL | 659 | 838 |
| AM11898-AS | 581 | 796 | AM11900-SS-NL | 659 | 838 |
| AM11897-AS | 580 | 796 | AM11901-SS-NL | 660 | 838 |
| AM11898-AS | 581 | 796 | AM11901-SS-NL | 660 | 838 |
| AM12234-AS | 582 | 797 | AM10753-SS-NL | 627 | 839 |
| AM12236-AS | 583 | 797 | AM12235-SS-NL | 661 | 839 |
| AM12237-AS | 584 | 797 | AM12235-SS-NL | 661 | 839 |
| AM12236-AS | 583 | 797 | AM12238-SS-NL | 662 | 858 |
| AM12236-AS | 583 | 797 | AM12239-SS-NL | 663 | 859 |
| AM12240-AS | 585 | 797 | AM12238-SS-NL | 662 | 858 |
| AM12241-AS | 586 | 797 | AM12238-SS-NL | 662 | 858 |
| AM12236-AS | 583 | 797 | AM12242-SS-NL | 664 | 860 |
| AM12236-AS | 583 | 797 | AM12243-SS-NL | 665 | 861 |
| AM12245-AS | 587 | 814 | AM12244-SS-NL | 666 | 862 |
| AM10309-AS | 522 | 780 | AM10644-SS-NL | 619 | 818 |
| AM12593-AS | 588 | 815 | AM12592-SS-NL | 667 | 863 |
| AM12594-AS | 589 | 796 | AM11900-SS-NL | 659 | 838 |
| AM12596-AS | 590 | 816 | AM12595-SS-NL | 668 | 864 |
| AM11897-AS | 580 | 796 | AM12597-SS-NL | 669 | 838 |
| AM10754-AS | 547 | 797 | AM12754-SS-NL | 670 | 858 |
| AM12234-AS | 582 | 797 | AM12754-SS-NL | 670 | 858 |
| AM12236-AS | 583 | 797 | AM10753-SS-NL | 627 | 839 |
| AM10754-AS | 547 | 797 | AM12235-SS-NL | 661 | 839 |
| AM12755-AS | 591 | 797 | AM12235-SS-NL | 661 | 839 |
| AM12756-AS | 592 | 797 | AM12235-SS-NL | 661 | 839 |
| AM12757-AS | 593 | 797 | AM12235-SS-NL | 661 | 839 |
| AM11897-AS | 580 | 796 | AM12910-SS-NL | 671 | 838 |
| AM11898-AS | 581 | 796 | AM12910-SS-NL | 671 | 838 |
| AM10754-AS | 547 | 797 | AM12911-SS-NL | 672 | 839 |
| AM10309-AS | 522 | 780 | AM13987-SS-NL | 673 | 818 |
| AM10308-AS | 521 | 780 | AM13987-SS-NL | 673 | 818 |
| AM14090-AS | 594 | 780 | AM10725-SS-NL | 624 | 818 |
| AM14091-AS | 595 | 780 | AM10725-SS-NL | 624 | 818 |
| AM14091-AS | 595 | 780 | AM14092-SS-NL | 674 | 818 |
| AM14093-AS | 596 | 796 | AM11900-SS-NL | 659 | 838 |
| AM14094-AS | 597 | 796 | AM11900-SS-NL | 659 | 838 |
| AM14095-AS | 598 | 796 | AM11900-SS-NL | 659 | 838 |
| AM14095-AS | 598 | 796 | AM12597-SS-NL | 669 | 838 |
| AM14095-AS | 598 | 796 | AM11896-SS-NL | 657 | 838 |
| AM15021-AS | 599 | 810 | AM11195-SS-NL | 645 | 852 |
| AM15767-AS | 600 | 817 | AM15766-SS-NL | 675 | 865 |
| AM15770-AS | 601 | 781 | AM10310-SS-NL | 603 | 819 |
| AM10309-AS | 522 | 780 | AM16133-SS-NL | 676 | 818 |

TABLE 7B
RAGE RNAi Agent Duplexes with Corresponding Sense and Antisense
Strand ID Numbers and Sequence ID numbers for the modified and
unmodified nucleotide sequences.

| | | AS | AS | | SS | SS |
|---|---|---|---|---|---|---|
| | | modified | unmodified | | modified | unmodified |
| | | SEQ ID | SEQ ID | | SEQ ID | SEQ ID |
| Duplex | AS ID | NO: | NO: | SS ID | NO: | NO: |
| AD07474 | AM10308-AS | 521 | 780 | AM10307-SS | 677 | 818 |
| AD07475 | AM10309-AS | 522 | 780 | AM10307-SS | 677 | 818 |
| AD07476 | AM10311-AS | 523 | 781 | AM10310-SS | 678 | 819 |
| AD07477 | AM10312-AS | 524 | 781 | AM10310-SS | 678 | 819 |
| AD07478 | AM10314-AS | 525 | 782 | AM10313-SS | 679 | 820 |
| AD07479 | AM10315-AS | 526 | 782 | AM10313-SS | 679 | 820 |
| AD07480 | AM10317-AS | 527 | 783 | AM10316-SS | 680 | 821 |
| AD07481 | AM10318-AS | 528 | 783 | AM10316-SS | 680 | 821 |
| AD07559 | AM10467-AS | 529 | 784 | AM10466-SS | 681 | 822 |
| AD07560 | AM10469-AS | 530 | 785 | AM10468-SS | 682 | 823 |
| AD07561 | AM10471-AS | 531 | 786 | AM10470-SS | 683 | 824 |
| AD07562 | AM10473-AS | 532 | 787 | AM10472-SS | 684 | 825 |
| AD07563 | AM10475-AS | 533 | 788 | AM10474-SS | 685 | 826 |
| AD07564 | AM10477-AS | 534 | 789 | AM10476-SS | 686 | 827 |
| AD07565 | AM10479-AS | 535 | 790 | AM10478-SS | 687 | 828 |
| AD07566 | AM10481-AS | 536 | 791 | AM10480-SS | 688 | 829 |
| AD07567 | AM10483-AS | 537 | 792 | AM10482-SS | 689 | 830 |
| AD07621 | AM10571-AS | 538 | 793 | AM10570-SS | 690 | 831 |
| AD07622 | AM10573-AS | 539 | 793 | AM10572-SS | 691 | 832 |
| AD07623 | AM10575-AS | 540 | 794 | AM10574-SS | 692 | 833 |
| AD07624 | AM10575-AS | 540 | 794 | AM10576-SS | 693 | 834 |
| AD07661 | AM10308-AS | 521 | 780 | AM10644-SS | 694 | 818 |
| AD07700 | AM10717-AS | 541 | 795 | AM10716-SS | 695 | 835 |
| AD07701 | AM10308-AS | 521 | 780 | AM10718-SS | 696 | 836 |
| AD07702 | AM10308-AS | 521 | 780 | AM10719-SS | 697 | 866 |
| AD07703 | AM10720-AS | 542 | 780 | AM10307-SS | 677 | 818 |
| AD07704 | AM10308-AS | 521 | 780 | AM10721-SS | 698 | 837 |
| AD07705 | AM10722-AS | 543 | 780 | AM10307-SS | 677 | 818 |
| AD07706 | AM10723-AS | 544 | 780 | AM10307-SS | 677 | 818 |
| AD07707 | AM10724-AS | 545 | 780 | AM10307-SS | 677 | 818 |
| AD07708 | AM10723-AS | 544 | 780 | AM10725-SS | 699 | 818 |
| AD07715 | AM10317-AS | 527 | 783 | AM10737-SS | 700 | 821 |
| AD07725 | AM10752-AS | 546 | 796 | AM10751-SS | 701 | 838 |
| AD07726 | AM10754-AS | 547 | 797 | AM10753-SS | 702 | 839 |
| AD07727 | AM10756-AS | 548 | 798 | AM10755-SS | 703 | 840 |
| AD07728 | AM10758-AS | 549 | 799 | AM10757-SS | 704 | 841 |
| AD07729 | AM10760-AS | 550 | 800 | AM10759-SS | 705 | 842 |
| AD07730 | AM10762-AS | 551 | 801 | AM10761-SS | 706 | 843 |
| AD07736 | AM10774-AS | 552 | 802 | AM10773-SS | 707 | 844 |
| AD07737 | AM10776-AS | 553 | 803 | AM10775-SS | 708 | 845 |
| AD07738 | AM10778-AS | 554 | 804 | AM10777-SS | 709 | 846 |
| AD07739 | AM10780-AS | 555 | 805 | AM10779-SS | 710 | 847 |
| AD07740 | AM10782-AS | 556 | 806 | AM10781-SS | 711 | 848 |
| AD07741 | AM10784-AS | 557 | 807 | AM10783-SS | 712 | 849 |
| AD07742 | AM10786-AS | 558 | 808 | AM10785-SS | 713 | 850 |
| AD07743 | AM10788-AS | 559 | 809 | AM10787-SS | 714 | 851 |
| AD07972 | AM11103-AS | 560 | 780 | AM10307-SS | 677 | 818 |
| AD07973 | AM11104-AS | 561 | 780 | AM10307-SS | 677 | 818 |
| AD07974 | AM11104-AS | 561 | 780 | AM11105-SS | 715 | 818 |
| AD07975 | AM11104-AS | 561 | 780 | AM11106-SS | 716 | 818 |
| AD07976 | AM11104-AS | 561 | 780 | AM11107-SS | 717 | 818 |
| AD08030 | AM10309-AS | 522 | 780 | AM10721-SS | 698 | 837 |
| AD08031 | AM11188-AS | 562 | 780 | AM10725-SS | 699 | 818 |
| AD08032 | AM10723-AS | 544 | 780 | AM11189-SS | 718 | 837 |
| AD08033 | AM11188-AS | 562 | 780 | AM11189-SS | 718 | 837 |
| AD08034 | AM11190-AS | 563 | 780 | AM10725-SS | 699 | 818 |
| AD08035 | AM11191-AS | 564 | 780 | AM10725-SS | 699 | 818 |
| AD08036 | AM11192-AS | 565 | 780 | AM10725-SS | 699 | 818 |
| AD08037 | AM11194-AS | 566 | 795 | AM11193-SS | 719 | 835 |
| AD08038 | AM11196-AS | 567 | 810 | AM11195-SS | 720 | 852 |
| AD08039 | AM10723-AS | 544 | 780 | AM11197-SS | 721 | 867 |
| AD08258 | AM10309-AS | 522 | 780 | AM11512-SS | 722 | 818 |
| AD08259 | AM10309-AS | 522 | 780 | AM11513-SS | 723 | 818 |
| AD08260 | AM10309-AS | 522 | 780 | AM11514-SS | 724 | 818 |
| AD08261 | AM10309-AS | 522 | 780 | AM11515-SS | 725 | 818 |
| AD08262 | AM10309-AS | 522 | 780 | AM11516-SS | 726 | 818 |
| AD08263 | AM10309-AS | 522 | 780 | AM11517-SS | 727 | 818 |
| AD08432 | AM11757-AS | 568 | 780 | AM10725-SS | 699 | 818 |
| AD08433 | AM11758-AS | 569 | 780 | AM10725-SS | 699 | 818 |
| AD08434 | AM11759-AS | 570 | 795 | AM11193-SS | 719 | 835 |
| AD08435 | AM11760-AS | 571 | 795 | AM11193-SS | 719 | 835 |
| AD08436 | AM11761-AS | 572 | 795 | AM11193-SS | 719 | 835 |
| AD08437 | AM11762-AS | 573 | 780 | AM10725-SS | 699 | 818 |
| AD08438 | AM11763-AS | 574 | 795 | AM11193-SS | 719 | 835 |
| AD08439 | AM11764-AS | 575 | 795 | AM11193-SS | 719 | 835 |
| AD08510 | AM11889-AS | 576 | 811 | AM11888-SS | 728 | 853 |
| AD08511 | AM11889-AS | 576 | 811 | AM11890-SS | 729 | 854 |
| AD08512 | AM11892-AS | 577 | 812 | AM11891-SS | 730 | 855 |
| AD08513 | AM11894-AS | 578 | 813 | AM11893-SS | 731 | 856 |
| AD08514 | AM11895-AS | 579 | 796 | AM10751-SS | 701 | 838 |
| AD08515 | AM11897-AS | 580 | 796 | AM11896-SS | 732 | 838 |
| AD08516 | AM11898-AS | 581 | 796 | AM11896-SS | 732 | 838 |
| AD08517 | AM11898-AS | 581 | 796 | AM11899-SS | 733 | 857 |
| AD08518 | AM11897-AS | 580 | 796 | AM11900-SS | 734 | 838 |
| AD08519 | AM11898-AS | 581 | 796 | AM11900-SS | 734 | 838 |
| AD08520 | AM11897-AS | 580 | 796 | AM11901-SS | 735 | 838 |
| AD08521 | AM11898-AS | 581 | 796 | AM11901-SS | 735 | 838 |
| AD08711 | AM12234-AS | 582 | 797 | AM10753-SS | 702 | 839 |
| AD08712 | AM12236-AS | 583 | 797 | AM12235-SS | 736 | 839 |
| AD08713 | AM12237-AS | 584 | 797 | AM12235-SS | 736 | 839 |
| AD08714 | AM12236-AS | 583 | 797 | AM12238-SS | 737 | 858 |
| AD08715 | AM12236-AS | 583 | 797 | AM12239-SS | 738 | 859 |
| AD08716 | AM12240-AS | 585 | 797 | AM12238-SS | 737 | 858 |
| AD08717 | AM12241-AS | 586 | 797 | AM12238-SS | 737 | 858 |
| AD08718 | AM12236-AS | 583 | 797 | AM12242-SS | 739 | 860 |
| AD08719 | AM12236-AS | 583 | 797 | AM12243-SS | 740 | 861 |
| AD08720 | AM12245-AS | 587 | 814 | AM12244-SS | 741 | 862 |
| AD08898 | AM10309-AS | 522 | 780 | AM10644-SS | 694 | 818 |
| AD08944 | AM12593-AS | 588 | 815 | AM12592-SS | 742 | 863 |
| AD08945 | AM12594-AS | 589 | 796 | AM11900-SS | 734 | 838 |
| AD08946 | AM12596-AS | 590 | 816 | AM12595-SS | 743 | 864 |
| AD08947 | AM11897-AS | 580 | 796 | AM12597-SS | 744 | 838 |
| AD09051 | AM10754-AS | 547 | 797 | AM12754-SS | 745 | 858 |
| AD09052 | AM12234-AS | 582 | 797 | AM12754-SS | 745 | 858 |
| AD09053 | AM12236-AS | 583 | 797 | AM10753-SS | 702 | 839 |
| AD09054 | AM10754-AS | 547 | 797 | AM12235-SS | 736 | 839 |
| AD09055 | AM12755-AS | 591 | 797 | AM12235-SS | 736 | 839 |
| AD09056 | AM12756-AS | 592 | 797 | AM12235-SS | 736 | 839 |
| AD09057 | AM12757-AS | 593 | 797 | AM12235-SS | 736 | 839 |
| AD09150 | AM11897-AS | 580 | 796 | AM12910-SS | 746 | 838 |
| AD09151 | AM11898-AS | 581 | 796 | AM12910-SS | 746 | 838 |
| AD09152 | AM10754-AS | 547 | 797 | AM12911-SS | 747 | 839 |
| AD09797 | AM10309-AS | 522 | 780 | AM13987-SS | 748 | 818 |
| AD09868 | AM10308-AS | 521 | 780 | AM13987-SS | 748 | 818 |
| AD09870 | AM14090-AS | 594 | 780 | AM10725-SS | 699 | 818 |
| AD09871 | AM14091-AS | 595 | 780 | AM10725-SS | 699 | 818 |
| AD09872 | AM14091-AS | 595 | 780 | AM14092-SS | 749 | 818 |
| AD09873 | AM14093-AS | 596 | 796 | AM11900-SS | 734 | 838 |
| AD09874 | AM14094-AS | 597 | 796 | AM11900-SS | 734 | 838 |
| AD09875 | AM14095-AS | 598 | 796 | AM11900-SS | 734 | 838 |
| AD09876 | AM14095-AS | 598 | 796 | AM12597-SS | 744 | 838 |
| AD09877 | AM14095-AS | 598 | 796 | AM11896-SS | 732 | 838 |
| AD10543 | AM15021-AS | 599 | 810 | AM11195-SS | 720 | 852 |
| AD11078 | AM15767-AS | 600 | 817 | AM15766-SS | 750 | 865 |
| AD11080 | AM15770-AS | 601 | 781 | AM10310-SS | 678 | 819 |
| AD11353 | AM10309-AS | 522 | 780 | AM16133-SS | 751 | 818 |

TABLE 8
RAGE RNAi Agent Duplexes with Corresponding Sense and Antisense Strand
ID Numbers and Sequence ID numbers for the modified and unmodified nucleotide
sequences. (Shown with Targeting Ligand Conjugates)

| | | AS | AS | | SS | SS |
|---|---|---|---|---|---|---|
| | | modified | unmodified | | modified | unmodified |
| | | SEQ ID | SEQ ID | | SEQ ID | SEQ ID |
| Duplex | AS ID | NO: | NO: | SS ID | NO: | NO: |
| AC000286 | AM10308-AS | 521 | 780 | CS000363 | 752 | 818 |
| AC000287 | AM10309-AS | 522 | 780 | CS000363 | 752 | 818 |
| AC000288 | AM11103-AS | 560 | 780 | CS000363 | 752 | 818 |
| AC000289 | AM11104-AS | 561 | 780 | CS000363 | 752 | 818 |
| AC000290 | AM11104-AS | 561 | 780 | CS000368 | 753 | 818 |
| AC000291 | AM11104-AS | 561 | 780 | CS000369 | 754 | 818 |
| AC000292 | AM10309-AS | 522 | 780 | CS000363 | 752 | 818 |
| AC000293 | AM11103-AS | 560 | 780 | CS000363 | 752 | 818 |
| AC000294 | AM11104-AS | 561 | 780 | CS000363 | 752 | 818 |
| AC000312 | AM11104-AS | 561 | 780 | CS000386 | 755 | 818 |
| AC000414 | AM11188-AS | 562 | 780 | CS000497 | 756 | 837 |
| AC000415 | AM11190-AS | 563 | 780 | CS000499 | 757 | 818 |
| AC000416 | AM11191-AS | 564 | 780 | CS000499 | 757 | 818 |
| AC000417 | AM11192-AS | 565 | 780 | CS000499 | 757 | 818 |
| AC000418 | AM11194-AS | 566 | 795 | CS000503 | 758 | 835 |
| AC000419 | AM11196-AS | 567 | 810 | CS000505 | 759 | 852 |
| AC000420 | AM10723-AS | 544 | 780 | CS000507 | 760 | 867 |
| AC000438 | AM10308-AS | 521 | 780 | CS000531 | 761 | 837 |
| AC000439 | AM10723-AS | 544 | 780 | CS000499 | 757 | 818 |
| AC000440 | AM10309-AS | 522 | 780 | CS000531 | 761 | 837 |
| AC000441 | AM11188-AS | 562 | 780 | CS000499 | 757 | 818 |
| AC000442 | AM10723-AS | 544 | 780 | CS000497 | 756 | 837 |
| AC000549 | AM10309-AS | 522 | 780 | CS000672 | 762 | 818 |
| AC000550 | AM10309-AS | 522 | 780 | CS000673 | 763 | 818 |
| AC000551 | AM10309-AS | 522 | 780 | CS000674 | 764 | 818 |
| AC000552 | AM10309-AS | 522 | 780 | CS000675 | 765 | 818 |
| AC000567 | AM10309-AS | 522 | 780 | CS000690 | 766 | 818 |
| AC000568 | AM10309-AS | 522 | 780 | CS000691 | 767 | 818 |
| AC000790 | AM10717-AS | 541 | 795 | CS000986 | 768 | 835 |
| AC000791 | AM10308-AS | 521 | 780 | CS000988 | 769 | 836 |
| AC000792 | AM10308-AS | 521 | 780 | CS000989 | 770 | 866 |
| AC000793 | AM10720-AS | 542 | 780 | CS000363 | 752 | 818 |
| AC000794 | AM10722-AS | 543 | 780 | CS000363 | 752 | 818 |
| AC000795 | AM10723-AS | 544 | 780 | CS000363 | 752 | 818 |
| AC000796 | AM10724-AS | 545 | 780 | CS000363 | 752 | 818 |
| AC000818 | AM10311-AS | 523 | 781 | CS001021 | 771 | 819 |
| AC000819 | AM10312-AS | 524 | 781 | CS001021 | 771 | 819 |
| AC000820 | AM10314-AS | 525 | 782 | CS001024 | 772 | 820 |
| AC000821 | AM10315-AS | 526 | 782 | CS001024 | 772 | 820 |
| AC000822 | AM10317-AS | 527 | 783 | CS001027 | 773 | 821 |
| AC000823 | AM10318-AS | 528 | 783 | CS001027 | 773 | 821 |
| AC001134 | AM11762-AS | 573 | 780 | CS000499 | 757 | 818 |
| AC001266 | AM11897-AS | 580 | 796 | CS001579 | 774 | 838 |
| AC001267 | AM11898-AS | 581 | 796 | CS001579 | 774 | 838 |
| AC001268 | AM10754-AS | 547 | 797 | CS001582 | 775 | 839 |
| AC001274 | AM11757-AS | 568 | 780 | CS000499 | 757 | 818 |
| AC001653 | AM14090-AS | 594 | 780 | CS000499 | 757 | 818 |
| AC001654 | AM14091-AS | 595 | 780 | CS000499 | 757 | 818 |
| AC001655 | AM14091-AS | 595 | 780 | CS002138 | 776 | 818 |
| AC001877 | AM11897-AS | 580 | 796 | CS002399 | 777 | 838 |
| AC002047 | AM15021-AS | 599 | 810 | CS000505 | 759 | 852 |
| AC002345 | AM15767-AS | 600 | 817 | CS002976 | 778 | 865 |
| AC002347 | AM15770-AS | 601 | 781 | CS001021 | 771 | 819 |
| AC002399 | AM10309-AS | 522 | 780 | CS003048 | 779 | 818 |

TABLE 9A
Conjugate Duplex ID Numbers Referencing Position
Targeted On AGER (RAGE) Gene

| | | | Targeted |
|---|---|---|---|
| | | | AGER Gene |
| | | | Position |
| Duplex | AS ID | SS ID | (Of SEQ ID NO:1) |
| AC000286 | AM10308-AS | CS000363 | 177 |
| AC000287 | AM10309-AS | CS000363 | 177 |
| AC000288 | AM11103-AS | CS000363 | 177 |
| AC000289 | AM11104-AS | CS000363 | 177 |
| AC000290 | AM11104-AS | CS000368 | 177 |
| AC000291 | AM11104-AS | CS000369 | 177 |
| AC000292 | AM10309-AS | CS000363 | 177 |
| AC000293 | AM11103-AS | CS000363 | 177 |
| AC000294 | AM11104-AS | CS000363 | 177 |
| AC000312 | AM11104-AS | CS000386 | 177 |
| AC000414 | AM11188-AS | CS000497 | 177 |
| AC000415 | AM11190-AS | CS000499 | 177 |
| AC000416 | AM11191-AS | CS000499 | 177 |
| AC000417 | AM11192-AS | CS000499 | 177 |
| AC000418 | AM11194-AS | CS000503 | 177 |
| AC000419 | AM11196-AS | CS000505 | 177 |
| AC000420 | AM10723-AS | CS000507 | 177 |
| AC000438 | AM10308-AS | CS000531 | 177 |
| AC000439 | AM10723-AS | CS000499 | 177 |
| AC000440 | AM10309-AS | CS000531 | 177 |
| AC000441 | AM11188-AS | CS000499 | 177 |
| AC000442 | AM10723-AS | CS000497 | 177 |
| AC000549 | AM10309-AS | CS000672 | 177 |
| AC000550 | AM10309-AS | CS000673 | 177 |
| AC000551 | AM10309-AS | CS000674 | 177 |
| AC000552 | AM10309-AS | CS000675 | 177 |
| AC000567 | AM10309-AS | CS000690 | 177 |
| AC000568 | AM10309-AS | CS000691 | 177 |
| AC000790 | AM10717-AS | CS000986 | 177 |
| AC000791 | AM10308-AS | CS000988 | 177 |
| AC000792 | AM10308-AS | CS000989 | 177 |
| AC000793 | AM10720-AS | CS000363 | 177 |
| AC000794 | AM10722-AS | CS000363 | 177 |
| AC000795 | AM10723-AS | CS000363 | 177 |
| AC000796 | AM10724-AS | CS000363 | 177 |
| AC000818 | AM10311-AS | CS001021 | 178 |
| AC000819 | AM10312-AS | CS001021 | 178 |
| AC000820 | AM10314-AS | CS001024 | 384 |
| AC000821 | AM10315-AS | CS001024 | 384 |
| AC000822 | AM10317-AS | CS001027 | 391 |
| AC000823 | AM10318-AS | CS001027 | 391 |
| AC001134 | AM11762-AS | CS000499 | 177 |
| AC001266 | AM11897-AS | CS001579 | 90 |
| AC001267 | AM11898-AS | CS001579 | 90 |
| AC001268 | AM10754-AS | CS001582 | 330 |
| AC001274 | AM11757-AS | CS000499 | 177 |
| AC001653 | AM14090-AS | CS000499 | 177 |
| AC001654 | AM14091-AS | CS000499 | 177 |
| AC001655 | AM14091-AS | CS002138 | 177 |
| AC001877 | AM11897-AS | CS002399 | 90 |
| AC002047 | AM15021-AS | CS000505 | 177 |
| AC002345 | AM15767-AS | CS002976 | 392 |
| AC002347 | AM15770-AS | CS001021 | 178 |
| AC002399 | AM10309-AS | CS003048 | 177 |

TABLE 9B
Conjugate ID Numbers and Corresponding AD Duplex Numbers,
Referencing Position Targeted On RAGE (AGER) Gene

| | Corresponding | Targeted AGER |
|---|---|---|
| AC Duplex | AD Duplex | Gene Position |
| Number | Number | (Of SEQ ID NO:1) |
| AC000286 | AD07474 | 177 |
| AC000287 | AD07475 | 177 |
| AC000288 | AD07972 | 177 |
| AC000289 | AD07973 | 177 |
| AC000290 | AD07974 | 177 |
| AC000291 | AD07975 | 177 |
| AC000292 | AD07475 | 177 |
| AC000293 | AD07972 | 177 |
| AC000294 | AD07973 | 177 |
| AC000312 | AD07976 | 177 |
| AC000414 | AD08033 | 177 |
| AC000415 | AD08034 | 177 |
| AC000416 | AD08035 | 177 |
| AC000417 | AD08036 | 177 |
| AC000418 | AD08037 | 177 |
| AC000419 | AD08038 | 177 |
| AC000420 | AD08039 | 177 |
| AC000438 | AD07704 | 177 |
| AC000439 | AD07708 | 177 |
| AC000440 | AD08030 | 177 |
| AC000441 | AD08031 | 177 |
| AC000442 | AD08032 | 177 |
| AC000549 | AD08260 | 177 |
| AC000550 | AD08261 | 177 |
| AC000551 | AD08262 | 177 |
| AC000552 | AD08263 | 177 |
| AC000567 | AD08260 | 177 |
| AC000568 | AD08261 | 177 |
| AC000790 | AD07700 | 177 |
| AC000791 | AD07701 | 177 |
| AC000792 | AD07702 | 177 |
| AC000793 | AD07703 | 177 |
| AC000794 | AD07705 | 177 |
| AC000795 | AD07706 | 177 |
| AC000796 | AD07707 | 177 |
| AC000818 | AD07476 | 178 |
| AC000819 | AD07477 | 178 |
| AC000820 | AD07478 | 384 |
| AC000821 | AD07479 | 384 |
| AC000822 | AD07480 | 391 |
| AC000823 | AD07481 | 391 |
| AC001134 | AD08437 | 177 |
| AC001266 | AD09150 | 90 |
| AC001267 | AD09151 | 90 |
| AC001268 | AD09152 | 330 |
| AC001274 | AD08432 | 177 |
| AC001653 | AD09870 | 177 |
| AC001654 | AD09871 | 177 |
| AC001655 | AD09872 | 177 |
| AC001877 | AD10075 | 90 |
| AC002047 | AD10543 | 177 |
| AC002345 | AD11078 | 392 |
| AC002347 | AD11080 | 178 |
| AC002399 | AD11353 | 177 |

TABLE 10
Conjugate ID Numbers With Chemically Modified Antisense and
Sense Strands (including Linkers and Conjugates)

| | Sense Strand (Fully Modified | SEQ | | SEQ |
|---|---|---|---|---|
| AC ID | with Conjugated Targeting | ID | Antisense Strand | ID |
| Number | Ligand) (5′ → 3′) | NO. | (5′ → 3′) | NO. |
| AC000286 | Tri-SM6.1-αvß6- | 752 | usUfsgs UfgUfuCfaGfuUfuCfcAfuUfcC | 521 |
| | (TA14)csggaauggAfAfAfcugaacacaas | | fsg | |
| | (invAb) | | | |
| AC000287 | Tri-SM6.1-αvß6- | 752 | cPrpusUfsgsUfgUfuCfaGfuUfuCfcAfuU | 522 |
| | (TA14)csggaauggAfAfAfcugaacacaas | | fcCfsg | |
| | (invAb) | | | |
| AC000288 | Tri-SM6.1-αvß6- | 752 | cPrpusUfgUfgUfuCfaGfuUfuCfcAfuUfc | 560 |
| | (TA14)csggaauggAfAfAfcugaacacaas | | Cfsg | |
| | (invAb) | | | |
| AC000289 | Tri-SM6.1-αvß6- | 752 | cPrpuUfgUfgUfuCfaGfuUfuCfcAfuUfcC | 561 |
| | (TA14)csggaauggAfAfAfcugaacacaas | | fsg | |
| | (invAb) | | | |
| AC000290 | Tri-SM6.1-αvß6- | 753 | cPrpuUfgUfgUfuCfaGfuUfuCfcAfuUfcC | 561 |
| | (TA14)cggaaugg AfAfAfcugaacacaas | | fsg | |
| | (invAb) | | | |
| AC000291 | Tri-SM6.1-αvß6- | 754 | cPrpuUfgUfgUfuCfaGfuUfuCfcAfuUfcC | 561 |
| | (TA14)csggaauggAfAfAfcugaacacaa | | fsg | |
| | (invAb) | | | |
| AC000292 | Tri-SM6.1-αvß6- | 752 | cPrpusUfsgsUfgUfuCfaGfuUfuCfcAfuU | 522 |
| | (TA14)csggaauggAfAfAfcugaacacaas | | fcCfsg | |
| | (invAb) | | | |
| AC000293 | Tri-SM6.1-αvß6- | 752 | cPrpusUfgUfgUfuCfaGfuUfuCfcAfuUfc | 560 |
| | (TA14)csggaauggAfAfAfcugaacacaas | | Cfsg | |
| | (invAb) | | | |
| AC000294 | Tri-SM6.1-αvß6- | 752 | cPrpuUfgUfgUfuCfaGfuUfuCfcAfuUfcC | 561 |
| | (TA14)csggaauggAfAfAfcugaacacaas | | fsg | |
| | (invAb) | | | |
| AC000312 | Tri-SM6.1-αvß6- | 755 | cPrpuUfgUfgUfuCfaGfuUfuCfcAfuUfcC | 561 |
| | (TA14)cggaauggAfAfAfcugaacacaa | | fsg | |
| | (invAb) | | | |
| AC000414 | Tri-SM6.1-αvß6- | 756 | cPrpusUfsgsuguucaguUfuCfcAfuuccsg | 562 |
| | (TA14)csggaauGfgAfaAfcugaauacaas | | | |
| | (invAb) | | | |
| AC000415 | Tri-SM6.1-αvß6- | 757 | usUfsgsuguuCUNAaguUfuCfcAfuuccsg | 563 |
| | (TA14)csggaauGfgAfaAfcugaacacaas | | | |
| | (invAb) | | | |
| AC000416 | Tri-SM6.1-αvß6- | 757 | usUfsgsuguUUNAcaguUfuCfcAfuuccsg | 564 |
| | (TA14)csggaauGfgAfaAfcugaacacaas | | | |
| | (invAb) | | | |
| AC000417 | Tri-SM6.1-αvß6- | 757 | usUfsgsugUUNAucaguUfuCfcAfuuccsg | 565 |
| | (TA14)csggaauGfgAfaAfcugaacacaas | | | |
| | (invAb) | | | |
| AC000418 | Tri-SM6.1-αvß6- | 758 | usUfsgsuguucaguUfuCfcAfuuccsc | 566 |
| | (TA14)gsggaauGfgAfaAfcugaacacaas | | | |
| | (invAb) | | | |
| AC000419 | Tri-SM6.1-αvß6- | 759 | usUfsgsuguucaguUfuCfcAfuuccsa | 567 |
| | (TA14)usggaauGfgAfaAfcugaacacaas | | | |
| | (invAb) | | | |
| AC000420 | Tri-SM6.1-αvß6-(TA14) | 760 | usUfsgsuguucaguUfuCfcAfuuccsg | 544 |
| | csggaauGfgAfa_2NAfcugaacacaas | | | |
| | (invAb) | | | |
| AC000438 | Tri-SM6.1-αvß6- | 761 | usUfsgsUfgUfuCfaGfuUfuCfcAfuUfcCf | 521 |
| | (TA14)csggaauggAfAfAfcugaauacaas | | sg | |
| | (invAb) | | | |
| AC000439 | Tri-SM6.1-αvß6- | 757 | usUfsgsuguucaguUfuCfcAfuuccsg | 544 |
| | (TA14)csggaauGfgAfaAfcugaacacaas | | | |
| | (invAb) | | | |
| AC000440 | Tri-SM6.1-αvß6- | 761 | cPrpusUfsgsUfgUfuCfaGfuUfuCfcAfuU | 522 |
| | (TA14)csggaauggAfAfAfcugaauacaas | | fcCfsg | |
| | (invAb) | | | |
| AC000441 | Tri-SM6.1-αvß6- | 757 | cPrpusUfsgsuguucaguUfuCfcAfuuccsg | 562 |
| | (TA14)csggaauGfgAfaAfcugaacacaas | | | |
| | (invAb) | | | |
| AC000442 | Tri-SM6.1-αvß6- | 756 | usUfsgsuguucaguUfuCfcAfuuccsg | 544 |
| | (TA14)csggaauGfgAfaAfcugaauacaas | | | |
| | (invAb) | | | |
| AC000549 | αvß6-SM6.1-L6-C6- | 762 | cPrpusUfsgsUfgUfuCfaGfuUfuCfcAfuU | 522 |
| | csggaauggAfAfAfcugaacacaas | | Cfsg | |
| | (invAb) | | fc | |
| AC000550 | αvß6-SM6.1-L6-C6s-(invAb) | 763 | cPrpusUfsgsUfgUfuCfaGfuUfuCfcAfuU | 522 |
| | scggaauggAfAfAfcugaacacaas | | fcCfsg | |
| | (invAb) | | | |
| AC000551 | αvß6-SM6.1-Alk-cyHex- | 764 | cPrpusUfsgsUfgUfuCfaGfuUfuCfcAfuU | 522 |
| | csggaaugg AfAfAfcugaacacaas | | fcCfsg | |
| | (invAb) | | | |
| AC000552 | αvß6-SM6.1-Alk-cyHexs-(invAb) | 765 | cPrpusUfsgsUfgUfuCfaGfuUfuCfcAfuU | 522 |
| | scggaauggAfAfAfcugaacacaas | | fcCfsg | |
| | (invAb) | | | |
| AC000567 | αvß6-pep1-C6- | 766 | cPrpusUfsgsUfgUfuCfaGfuUfuCfcAfuU | 522 |
| | csggaauggAfAfAfcugaacacaas | | fcCfsg | |
| | (invAb) | | | |
| AC000568 | αvß6-pep1-C6s-(invAb) | 767 | cPrpusUfsgsUfgUfuCfaGfuUfuCfcAfuU | 522 |
| | scggaauggAfAfAfcugaacacaas | | fcCfsg | |
| | (invAb) | | | |
| AC000790 | Tri-SM6.1-αvß6-(TA14) | 768 | usUfsgsUfgUfuCfaGfuUfuCfcAfuUfcCf | 541 |
| | gsggaauggAfAfAfcugaacacaas | | sc | |
| | (invAb) | | | |
| AC000791 | Tri-SM6.1-αvß6-(TA14) | 769 | usUfsgsUfgUfuCfaGfuUfuCfcAfuUfcCf | 521 |
| | csggaauggAfAfAfcuiaacacaas | | sg | |
| | (invAb) | | | |
| AC000792 | Tri-SM6.1-αvß6-(TA14) | 770 | usUfsgsUfgUfuCfaGfuUfuCfcAfuUfcCf | 521 |
| | csggaauggAfa_2NAfcuiaacacaas | | sg | |
| | (invAb) | | | |
| AC000793 | Tri-SM6.1-αvß6-(TA14) | 752 | usUfsgsUfgUfUUNACfaGfuUfuCfcAfuUf | 542 |
| | csggaauggAfAfAfcugaacacaas | | cCfsg | |
| | (invAb) | | | |
| AC000794 | Tri-SM6.1-αvß6-(TA14) | 752 | usUfsgsUfgUfucaguUfuCfcAfuUfcCfsg | 543 |
| | csggaauggAfAfAfcugaacacaas | | | |
| | (invAb) | | | |
| AC000795 | Tri-SM6.1-αvß6-(TA14) | 752 | usUfsgsuguucaguUfuCfcAfuuccsg | 544 |
| | csggaauggAfAfAfcugaacacaas | | | |
| | (invAb) | | | |
| AC000796 | Tri-SM6.1-αvß6-(TA14) | 752 | usUfsgsuguucaGfuUfuCfcAfuuccsg | 545 |
| | csggaauggAfAfAfcugaacacaas | | | |
| | (invAb) | | | |
| AC000818 | Tri-SM6.1-αvß6-(TA14) | 771 | usCfsusGfuGfuUfcAfgUfuUfcCfaUfuCf | 523 |
| | gsgaauggaAfAfCfugaacacaias | | sc | |
| | (invAb) | | | |
| AC000819 | Tri-SM6.1-αvß6-(TA14) | 771 | cPrpusCfsusGfuGfuUfcAfgUfuUfcCfaU | 524 |
| | gsgaauggaAfAfCfugaacacaias | | fuCfsc | |
| | (invAb) | | | |
| AC000820 | Tri-SM6.1-αvß6-(TA14) | 772 | usUfsgsGfcUfuCfcCfaGfgAfaUfcUfgGf | 525 |
| | asccagauuCfCfUfgggaaiccaas | | su | |
| | (invAb) | | | |
| AC000821 | Tri-SM6.1-αvß6-(TA14) | 772 | cPrpusUfsgsGfcUfuCfcCfaGfgAfaUfcU | 526 |
| | asccagauuCfCfUfgggaaiccaas | | fgGfsu | |
| | (invAb) | | | |
| AC000822 | Tri-SM6.1-αvß6-(TA14) | 773 | asCfsasAfuUfuCfuGfgCfuUfcCfcAfgGf | 527 |
| | usccugggaAfGfCfcagaaauugus | | sa | |
| | (invAb) | | | |
| AC000823 | Tri-SM6.1-αvß6-(TA14) | 773 | cPrpasCfsasAfuUfuCfuGfgCfuUfcCfcA | 528 |
| | usccugggaAfGfCfcagaaauugus | | Gfsa | |
| | (invAb) | | fg | |
| AC001134 | Tri-SM6.1-αvß6-(TA14) | 757 | cPrpusUfsgsuguUUNAcaguUfuCfcAfuuc | 573 |
| | csggaauGfgAfaAfcugaacacaas | | csg | |
| | (invAb) | | | |
| AC001266 | Tri-SM6.1-αvß6-(TA14) | 774 | usGfsasuguuuugaGfcAfcCfuacusc | 580 |
| | gsaguagGfuGfcUfcaaaacaucas | | | |
| | (invAb) | | | |
| AC001267 | Tri-SM6.1-αvß6-(TA14) | 774 | cPrpusGfsasuguuuugaGfcAfcCfuacusc | 581 |
| | gsaguagGfuGfcUfcaaaacaucas | | | |
| | (invAb) | | | |
| AC001268 | Tri-SM6.1-αvß6-(TA14) | 775 | usUfscsCfaUfuCfcUfgUfuCfaUfuGfcCf | 547 |
| | asggcaaugAfAfCfaggaauigaas | | su | |
| | (invAb) | | | |
| AC001274 | Tri-SM6.1-αvß6-(TA14) | 757 | cPrpuUfguguucaguUfuCfcAfuuccsg | 568 |
| | csggaauGfgAfaAfcugaacacaas | | | |
| | (invAb) | | | |
| AC001653 | Tri-SM6.1-avb6-(TA14) | 757 | usUfsgsUfguucaguUfuCfcAfuuccsg | 594 |
| | csggaauGfgAfaAfcugaacacaas | | | |
| | (invAb) | | | |
| AC001654 | Tri-SM6.1-avb6-(TA14) | 757 | usUfsgsuguUfcaguUfuCfcAfuuccsg | 595 |
| | csggaauGfgAfaAfcugaacacaas | | | |
| | (invAb) | | | |
| AC001655 | Tri-SM6.1-avb6-(TA14) | 776 | usUfsgsuguUfcaguUfuCfcAfuuccsg | 595 |
| | csggaauggAfaAfcUfgaacacaas | | | |
| | (invAb) | | | |
| AC001877 | Tri-SM6.1-avb6-(TA14) | 777 | usGfsasuguuuugaGfcAfcCfuacusc | 580 |
| | gsaguagGfuGfcUfcaaaacauca | | | |
| | (invAb) | | | |
| AC002047 | Tri-SM6.1-avb6-(TA14) | 759 | cPrpusUfsgsuguucaguUfuCfcAfuuccsa | 599 |
| | usggaauGfgAfaAfcugaacacaas | | | |
| | (invAb) | | | |
| AC002345 | Tri-SM6.1-avb6-(TA14) | 778 | cPrpusAfscsAfaUfuucugGfcUfuCfcCfa | 600 |
| | cscugggaaGfCfCfagaaauuguas | | gsg | |
| | (invAb) | | | |
| AC002347 | Tri-SM6.1-avb6-(TA14) | 771 | cPrpusCfsusGfuGfuucagUfuUfcCfaUfu | 601 |
| | gsgaauggaAfAfCfugaacacaias | | csc | |
| | (invAb) | | | |
| AC002399 | Tri-SM6.1-avb6-(TA14) | 779 | cPrpusUfsgsUfgUfuCfaGfuUfuCfcAfuU | 522 |
| | scsggaauggAfAfAfcugaacacaas | | fcCfsg | |
| | (invAb) | | | |

[0195] In some embodiments, a RAGE RNAi agent is prepared or provided as a salt, mixed salt, or a free-acid. In some embodiments, a RAGE RNAi agent is prepared or provided as a pharmaceutically acceptable salt. In some embodiments, a RAGE RNAi agent is prepared or provided as a pharmaceutically acceptable sodium or potassium salt The RNAi agents described herein, upon delivery to a cell expressing an AGER gene, inhibit or knockdown expression of one or more AGER genes in vivo and/or in vitro.

### Targeting Groups, Linking Groups, Pharmacokinetic/Pharmacodynamic (PK/PD) Modulators, and Delivery Vehicles

[0196] In some embodiments, a RAGE RNAi agent contains or is conjugated to one or more non-nucleotide groups including, but not limited to, a targeting group, a linking group, a pharmacokinetic/pharmacodynamic (PK/PD) modulator, a delivery polymer, or a delivery vehicle. The non-nucleotide group can enhance targeting, delivery, or attachment of the RNAi agent. The non-nucleotide group can be covalently linked to the 3′ and/or 5′ end of either the sense strand and/or the antisense strand. In some embodiments, a RAGE RNAi agent contains a non-nucleotide group linked to the 3′ and/or 5′ end of the sense strand. In some embodiments, a non-nucleotide group is linked to the 5′ end of a RAGE RNAi agent sense strand. A non-nucleotide group can be linked directly or indirectly to the RNAi agent via a linker/linking group. In some embodiments, a non-nucleotide group is linked to the RNAi agent via a labile, cleavable, or reversible bond or linker.

[0197] In some embodiments, a non-nucleotide group enhances the pharmacokinetic or biodistribution properties of an RNAi agent or conjugate to which it is attached to improve cell- or tissue-specific distribution and cell-specific uptake of the conjugate. In some embodiments, a non-nucleotide group enhances endocytosis of the RNAi agent.

[0198] Targeting groups or targeting moieties enhance the pharmacokinetic or biodistribution properties of a conjugate or RNAi agent to which they are attached to improve cell-specific (including, in some cases, organ specific) distribution and cell-specific (or organ specific) uptake of the conjugate or RNAi agent. A targeting group can be monovalent, divalent, trivalent, tetravalent, or have higher valency for the target to which it is directed. Representative targeting groups include, without limitation, compounds with affinity to cell surface molecule, cell receptor ligands, hapten, antibodies, monoclonal antibodies, antibody fragments, and antibody mimics with affinity to cell surface molecules. In some embodiments, a targeting group is linked to an RNAi agent using a linker, such as a PEG linker or one, two, or three abasic and/or ribitol (abasic ribose) residues, which in some instances can serve as linkers.

[0199] A targeting group, with or without a linker, can be attached to the 5′ or 3′ end of any of the sense and/or antisense strands disclosed in Tables 2, 3, 4, 5, 6, and 10. A linker, with or without a targeting group, can be attached to the 5′ or 3′ end of any of the sense and/or antisense strands disclosed in Tables 2, 3, 4, 5, 6, and 10.

[0200] The RAGE RNAi agents described herein can be synthesized having a reactive group, such as an amino group (also referred to herein as an amine), at the 5′-terminus and/or the 3′-terminus. The reactive group can be used subsequently to attach a targeting moiety using methods typical in the art.

[0201] For example, in some embodiments, the RAGE RNAi agents disclosed herein are synthesized having an NH₂-C₆ group at the 5′-terminus of the sense strand of the RNAi agent. The terminal amino group subsequently can be reacted to form a conjugate with, for example, a group that includes an αvβ6 integrin targeting ligand. In some embodiments, the RAGE RNAi agents disclosed herein are synthesized having one or more alkyne groups at the 5′-terminus of the sense strand of the RNAi agent. The terminal alkyne group(s) can subsequently be reacted to form a conjugate with, for example, a group that includes an αvβ6 integrin targeting ligand.

[0202] In some embodiments, a targeting group comprises an integrin targeting ligand. In some embodiments, an integrin targeting ligand is an αvβ6 integrin targeting ligand. The use of an αvβ6 integrin targeting ligand facilitates cell-specific targeting to cells having αvβ6 on its respective surface, and binding of the integrin targeting ligand can facilitate entry of the therapeutic agent, such as an RNAi agent, to which it is linked, into cells such as epithelial cells, including pulmonary epithelial cells and renal epithelial cells. Integrin targeting ligands can be monomeric or monovalent (e.g., having a single integrin targeting moiety) or multimeric or multivalent (e.g., having multiple integrin targeting moieties). The targeting group can be attached to the 3′ and/or 5′ end of the RNAi oligonucleotide using methods known in the art. The preparation of targeting groups, such as αvβ6 integrin targeting ligands, is described, for example, in International Patent Application Publication No. WO 2018/085415 and in International Patent Application Publication No. WO 2019/089765, the contents of each of which are incorporated herein in its entirety.

[0203] In some embodiments, targeting groups are linked to the RAGE RNAi agents without the use of an additional linker. In some embodiments, the targeting group is designed having a linker readily present to facilitate the linkage to a RAGE RNAi agent. In some embodiments, when two or more RNAi agents are included in a composition, the two or more RNAi agents can be linked to their respective targeting groups using the same linkers. In some embodiments, when two or more RNAi agents are included in a composition, the two or more RNAi agents are linked to their respective targeting groups using different linkers.

[0204] In some embodiments, a linking group is conjugated to the RNAi agent. The linking group facilitates covalent linkage of the agent to a targeting group, pharmacokinetic modulator, delivery polymer, or delivery vehicle. The linking group can be linked to the 3′ and/or the 5′ end of the RNAi agent sense strand or antisense strand. In some embodiments, the linking group is linked to the RNAi agent sense strand. In some embodiments, the linking group is conjugated to the 5′ or 3′ end of an RNAi agent sense strand. In some embodiments, a linking group is conjugated to the 5′ end of an RNAi agent sense strand. Examples of linking groups, include but are not limited to: C6-SS-C6, 6-SS-6, reactive groups such a primary amines (e.g., NH2-C6) and alkynes, alkyl groups, abasic residues/nucleotides, amino acids, tri-alkyne functionalized groups, ribitol, and/or PEG groups. Examples of certain linking groups are provided in Table 11.

[0205] A linker or linking group is a connection between two atoms that links one chemical group (such as an RNAi agent) or segment of interest to another chemical group (such as a targeting group, pharmacokinetic modulator, or delivery polymer) or segment of interest via one or more covalent bonds. A labile linkage contains a labile bond. A linkage can optionally include a spacer that increases the distance between the two joined atoms. A spacer may further add flexibility and/or length to the linkage. Spacers include, but are not be limited to, alkyl groups, alkenyl groups, alkynyl groups, aryl groups, aralkyl groups, aralkenyl groups, and aralkynyl groups; each of which can contain one or more heteroatoms, heterocycles, amino acids, nucleotides, and saccharides. Spacer groups are well known in the art and the preceding list is not meant to limit the scope of the description. In some embodiments, a RAGE RNAi agent is conjugated to a polyethylene glycol (PEG) moiety, or to a hydrophobic group having 12 or more carbon atoms, such as a cholesterol or palmitoyl group.

[0206] In some embodiments, a RAGE RNAi agent is linked to one or more pharmacokinetic/pharmacodynamic (PK/PD) modulators. PK/PD modulators can increase circulation time of the conjugated drug and/or increase the activity of the RNAi agent through improved cell receptor binding, improved cellular uptake, and/or other means. Various PK/PD modulators suitable for use with RNAi agents are known in the art. In some embodiments, the PK/PD modulatory can be cholesterol or cholesteryl derivatives, or in some circumstances a PK/PD modulator can be comprised of alkyl groups, alkenyl groups, alkynyl groups, aryl groups, aralkyl groups, aralkenyl groups, or aralkynyl groups, each of which may be linear, branched, cyclic, and/or substituted or unsubstituted. In some embodiments, the location of attachment for these moieties is at the 5′ or 3′ end of the sense strand, at the 2′ position of the ribose ring of any given nucleotide of the sense strand, and/or attached to the phosphate or phosphorothioate backbone at any position of the sense strand.

[0207] Any of the RAGE RNAi agent nucleotide sequences listed in Tables 2, 3, 4, 5, 6, and 10, whether modified or unmodified, can contain 3′ and/or 5′ targeting group(s), linking group(s), and/or PK/PD modulator(s). Any of the RAGE RNAi agent sequences listed in Tables 3, 4, 5, 6, and 10, or are otherwise described herein, which contain a 3′ or 5′ targeting group, linking group, and/or PK/PD modulator can alternatively contain no 3′ or 5′ targeting group, linking group, or PK/PD modulator, or can contain a different 3′ or 5′ targeting group, linking group, or pharmacokinetic modulator including, but not limited to, those depicted in Table 11. Any of the RAGE RNAi agent duplexes listed in Tables 7A, 7B, 8, 9A, 9B, and 10, whether modified or unmodified, can further comprise a targeting group or linking group, including, but not limited to, those depicted in Table 11, and the targeting group or linking group can be attached to the 3′ or 5′ terminus of either the sense strand or the antisense strand of the RAGE RNAi agent duplex.

[0208] Examples of certain modified nucleotides, capping moieties, and linking groups are provided in Table 11.

TABLE 11
Structures Representing Various Modified Nucleotides, Capping Moieties, and Linking Groups
(wherein [symbol] indicates the point of connection)

[chemical structure]

cPrpus

[chemical structure]

cPrpu

[chemical structure]

cPrpas

[chemical structure]

cPrpa

[chemical structure]

a_2N

[chemical structure]

a_2Ns
When positioned internally:

[chemical structure]

When positioned internally:

[chemical structure]

When positioned at the 3′ terminal end:

[chemical structure]

When positioned at the 3′ terminal end:

[chemical structure]

When positioned internally:

[chemical structure]

When positioned at the 3′ terminal end

[chemical structure]

When positioned internally:

[chemical structure]

[chemical structure]

(NH2—C6)

[chemical structure]

(NH2—C6)s

[chemical structure]

—C6—

[chemical structure]

—C6s—

[chemical structure]

—L6—C6—

[chemical structure]

—L6—C6s—

[chemical structure]

-Alk-cy-Hex-

[chemical structure]

(TriAlk14)

[chemical structure]

(TriAlk14)s

[chemical structure]

(TA14)

[chemical structure]

(TA14)s

[chemical structure]

SM6.1-αvβ6

[0209] Alternatively, other linking groups known in the art may be used. In many instances, linking groups can be commercially acquired or alternatively, are incorporated into commercially available nucleotide phosphoramidites. (See, e.g., International Patent Application Publication No. WO 2019/161213, which is incorporated herein by reference in its entirety).

[0210] In some embodiments, a RAGE RNAi agent is delivered without being conjugated to a targeting ligand or pharmacokinetic/pharmacodynamic (PK/PD) modulator (referred to as being “naked” or a “naked RNAi agent”).

[0211] In some embodiments, a RAGE RNAi agent is conjugated to a targeting group, a linking group, a PK modulator, and/or another non-nucleotide group to facilitate delivery of the RAGE RNAi agent to the cell or tissue of choice, for example, to an epithelial cell in vivo. In some embodiments, a RAGE RNAi agent is conjugated to a targeting group wherein the targeting group includes an integrin targeting ligand. In some embodiments, the integrin targeting ligand is an αvβ6 integrin targeting ligand. In some embodiments, a targeting group includes one or more αvβ6 integrin targeting ligands.

[0212] In some embodiments, a delivery vehicle may be used to deliver an RNAi agent to a cell or tissue. A delivery vehicle is a compound that improves delivery of the RNAi agent to a cell or tissue. A delivery vehicle can include, or consist of, but is not limited to: a polymer, such as an amphipathic polymer, a membrane active polymer, a peptide, a melittin peptide, a melittin-like peptide (MLP), a lipid, a reversibly modified polymer or peptide, or a reversibly modified membrane active polyamine.

[0213] In some embodiments, the RNAi agents can be combined with lipids, nanoparticles, polymers, liposomes, micelles, DPCs or other delivery systems available in the art for nucleic acid delivery. The RNAi agents can also be chemically conjugated to targeting groups, lipids (including, but not limited to cholesteryl and cholesteryl derivatives), encapsulating in nanoparticles, liposomes, micelles, conjugating to polymers or DPCs (see, for example WO 2000/053722, WO 2008/022309, WO 2011/104169, and WO 2012/083185, WO 2013/032829, WO 2013/158141, each of which is incorporated herein by reference), by iontophoresis, or by incorporation into other delivery vehicles or systems available in the art such as hydrogels, cyclodextrins, biodegradable nanocapsules, bioadhesive microspheres, or proteinaceous vectors. In some embodiments the RNAi agents can be conjugated to antibodies having affinity for pulmonary epithelial cells. In some embodiments, the RNAi agents can be linked to targeting ligands that have affinity for pulmonary epithelial cells or receptors present on pulmonary epithelial cells.

### Pharmaceutical Compositions and Formulations

[0214] The RAGE RNAi agents disclosed herein can be prepared as pharmaceutical compositions or formulations (also referred to herein as “medicaments”). In some embodiments, pharmaceutical compositions include at least one RAGE RNAi agent. These pharmaceutical compositions are particularly useful in the inhibition of the expression of AGER mRNA in a target cell, a group of cells, a tissue, or an organism. The pharmaceutical compositions can be used to treat a subject having a disease, disorder, or condition that would benefit from reduction in the level of the target mRNA, or inhibition in expression of the target gene. The pharmaceutical compositions can be used to treat a subject at risk of developing a disease or disorder that would benefit from reduction of the level of the target mRNA or an inhibition in expression the target gene. In one embodiment, the method includes administering a RAGE RNAi agent linked to a targeting ligand as described herein, to a subject to be treated. In some embodiments, one or more pharmaceutically acceptable excipients (including vehicles, carriers, diluents, and/or delivery polymers) are added to the pharmaceutical compositions that include a RAGE RNAi agent, thereby forming a pharmaceutical formulation or medicament suitable for in vivo delivery to a subject, including a human.

[0215] The pharmaceutical compositions that include a RAGE RNAi agent and methods disclosed herein decrease the level of the target mRNA in a cell, group of cells, group of cells, tissue, organ, or subject, including by administering to the subject a therapeutically effective amount of a herein described RAGE RNAi agent, thereby inhibiting the expression of AGER mRNA in the subject. In some embodiments, the subject has been previously identified or diagnosed as having a disease or disorder that can be mediated at least in part by a reduction in RAGE expression. In some embodiments, the subject has been previously diagnosed with having one or more pulmonary diseases such as asthma (including severe asthma), acute respiratory distress syndrome, idiopathic pulmonary fibrosis, chronic obstructive pulmonary disease (COPD), cystic fibrosis, lung cancer, or bronchopulmonary dysplasia. In some embodiments the pulmonary diseases is severe asthma.

[0216] In some embodiments the subject has been previously diagnosed with having cardiovascular disease (atherosclerosis, myocardial infarction, heart failure, peripheral vascular disease), cancer diabetes, chronic kidney disease, neurodegenerative disease, rheumatoid arthritis, non-alcoholic steatohepatitis, injury caused by certain viral infections including SARS-CoV-2, certain ocular inflammatory conditions, or skeletal muscle wasting.

[0217] In some embodiments, the subject has been previously diagnosed with having one or more ocular diseases related to ocular inflammation.

[0218] Embodiments of the present disclosure include pharmaceutical compositions for delivering a RAGE RNAi agent to a pulmonary epithelial cell in vivo. Such pharmaceutical compositions can include, for example, a RAGE RNAi agent conjugated to a targeting group that comprises an integrin targeting ligand. In some embodiments, the integrin targeting ligand is comprised of an αvβ6 integrin ligand.

[0219] In some embodiments, the described pharmaceutical compositions including a RAGE RNAi agent are used for treating or managing clinical presentations in a subject that would benefit from the inhibition of expression of RAGE. In some embodiments, a therapeutically or prophylactically effective amount of one or more of pharmaceutical compositions is administered to a subject in need of such treatment. In some embodiments, administration of any of the disclosed RAGE RNAi agents can be used to decrease the number, severity, and/or frequency of symptoms of a disease in a subject.

[0220] In some embodiments, the described RAGE RNAi agents are optionally combined with one or more additional (i.e., second, third, etc.) therapeutics. A second therapeutic can be another RAGE RNAi agent (e.g., a RAGE RNAi agent that targets a different sequence within an AGER (RAGE) gene). In some embodiments, a second therapeutic can be an RNAi agent that targets the AGER gene. An additional therapeutic can also be a small molecule drug, antibody, antibody fragment, and/or aptamer. The RAGE RNAi agents, with or without the one or more additional therapeutics, can be combined with one or more excipients to form pharmaceutical compositions.

[0221] The described pharmaceutical compositions that include a RAGE RNAi agent can be used to treat at least one symptom in a subject having a disease or disorder that would benefit from reduction or inhibition in expression of AGER mRNA. In some embodiments, the subject is administered a therapeutically effective amount of one or more pharmaceutical compositions that include a RAGE RNAi agent thereby treating the symptom. In other embodiments, the subject is administered a prophylactically effective amount of one or more RAGE RNAi agents, thereby preventing or inhibiting the at least one symptom.

[0222] In some embodiments, one or more of the described RAGE RNAi agents are administered to a mammal in a pharmaceutically acceptable carrier or diluent. In some embodiments, the mammal is a human.

[0223] The route of administration is the path by which a RAGE RNAi agent is brought into contact with the body. In general, methods of administering drugs, oligonucleotides, and nucleic acids, for treatment of a mammal are well known in the art and can be applied to administration of the compositions described herein. The RAGE RNAi agents disclosed herein can be administered via any suitable route in a preparation appropriately tailored to the particular route. Thus, in some embodiments, the herein described pharmaceutical compositions are administered via inhalation, intranasal administration, intratracheal administration, or orophaiyngeal aspiration administration. In some embodiments, the pharmaceutical compositions can be administered by injection, for example, intravenously, intramuscularly, intracutaneously, subcutaneously, intraarticularly, intraocularly, or intraperitoneally, or topically.

[0224] In some embodiments, the pharmaceutical compositions described herein comprise one or more pharmaceutically acceptable excipients. The pharmaceutical compositions described herein are formulated for administration to a subject.

[0225] As used herein, a pharmaceutical composition or medicament includes a pharmacologically effective amount of at least one of the described therapeutic compounds and one or more pharmaceutically acceptable excipients. Pharmaceutically acceptable excipients (excipients) are substances other than the Active Pharmaceutical Ingredient (API, therapeutic product, e.g., RAGE RNAi agent) that are intentionally included in the drug delivery system. Excipients do not exert or are not intended to exert a therapeutic effect at the intended dosage. Excipients can act to a) aid in processing of the drug delivery system during manufacture, b) protect, support or enhance stability, bioavailability or patient acceptability of the API, c) assist in product identification, and/or d) enhance any other attribute of the overall safety, effectiveness, of delivery of the API during storage or use. A pharmaceutically acceptable excipient may or may not be an inert substance.

[0226] Excipients include, but are not limited to: absorption enhancers, anti-adherents, anti-foaming agents, anti-oxidants, binders, buffering agents, carriers, coating agents, colors, delivery enhancers, delivery polymers, detergents, dextran, dextrose, diluents, disintegrants, emulsifiers, extenders, fillers, flavors, glidants, humectants, lubricants, oils, polymers, preservatives, saline, salts, solvents, sugars, surfactants, suspending agents, sustained release matrices, sweeteners, thickening agents, tonicity agents, vehicles, water-repelling agents, and wetting agents.

[0227] Pharmaceutical compositions suitable for injectable use include sterile aqueous solutions (where water-soluble) or dispersions and sterile powders for the extemporaneous preparation of sterile injectable solutions or dispersion. For intravenous administration, suitable carriers include physiological saline, bacteriostatic water, Cremophor® ELTM (BASF, Parsippany, NJ) or phosphate buffered saline (PBS). It should be stable under the conditions of manufacture and storage and should be preserved against the contaminating action of microorganisms such as bacteria and fungi. The carrier can be a solvent or dispersion medium containing, for example, water, ethanol, polyol (for example, glycerol, propylene glycol, and liquid polyethylene glycol), and suitable mixtures thereof. The proper fluidity can be maintained, for example, by the use of a coating such as lecithin, by the maintenance of the required particle size in the case of dispersion and by the use of surfactants. In many cases, it will be preferable to include isotonic agents, for example, sugars, polyalcohols such as mannitol, sorbitol, and sodium chloride in the composition. Prolonged absorption of the injectable compositions can be brought about by including in the composition an agent which delays absorption, for example, aluminum monostearate and gelatin.

[0228] Sterile injectable solutions can be prepared by incorporating the active compound in the required amount in an appropriate solvent with one or a combination of ingredients enumerated above, as required, followed by filter sterilization. Generally, dispersions are prepared by incorporating the active compound into a sterile vehicle which contains a basic dispersion medium and the required other ingredients from those enumerated above. In the case of sterile powders for the preparation of sterile injectable solutions, methods of preparation include vacuum drying and freeze-drying which yields a powder of the active ingredient plus any additional desired ingredient from a previously sterile-filtered solution thereof.

[0229] Formulations suitable for intra-articular administration can be in the form of a sterile aqueous preparation of the drug that can be in microcrystalline form, for example, in the form of an aqueous microcrystalline suspension. Liposomal formulations or biodegradable polymer systems can also be used to present the drug for both intra-articular and ophthalmic administration.

[0230] Formulations suitable for inhalation administration can be prepared by incorporating the active compound in the desired amount in an appropriate solvent, followed by sterile filtration. In general, formulations for inhalation administration are sterile solutions at physiological pH and have low viscosity (<5 cP). Salts may be added to the formulation to balance tonicity. In some cases, surfactants or co-solvents can be added to increase active compound solubility and improve aerosol characteristics. In some cases, excipients can be added to control viscosity in order to ensure size and distribution of nebulized droplets.

[0231] In some embodiments, pharmaceutical formulations that include the RAGE RNAi agents disclosed herein suitable for subcutaneous administration can be prepared in water for injection (sterile water), or an aqueous sodium phosphate buffer (for example, the RAGE RNAi agent formulated in 0.5 mM sodium phosphate monobasic, 0.5 mM sodium phosphate dibasic, in water).

[0232] The active compounds can be prepared with carriers that will protect the compound against rapid elimination from the body, such as a controlled release formulation, including implants and microencapsulated delivery systems. Biodegradable, biocompatible polymers can be used, such as ethylene vinyl acetate, polyanhydrides, polyglycolic acid, collagen, polyorthoesters, and polylactic acid. Methods for preparation of such formulations will be apparent to those skilled in the art. Liposomal suspensions can also be used as pharmaceutically acceptable carriers. These can be prepared according to methods known to those skilled in the art, for example, as described in U.S. Pat. No. 4,522,811.

[0233] The RAGE RNAi agents can be formulated in compositions in dosage unit form for ease of administration and uniformity of dosage. Dosage unit form refers to physically discrete units suited as unitary dosages for the subject to be treated; each unit containing a predetermined quantity of active compound calculated to produce the desired therapeutic effect in association with the required pharmaceutical carrier. The specification for the dosage unit forms of the disclosure are dictated by and directly dependent on the unique characteristics of the active compound and the therapeutic effect to be achieved, and the limitations inherent in the art of compounding such an active compound for the treatment of individuals.

[0234] A pharmaceutical composition can contain other additional components commonly found in pharmaceutical compositions. Such additional components include, but are not limited to: anti-pruritics, astringents, local anesthetics, or anti-inflammatory agents (e.g., antihistamine, diphenhydramine, etc.). It is also envisioned that cells, tissues, or isolated organs that express or comprise the herein defined RNAi agents may be used as “pharmaceutical compositions.” As used herein, “pharmacologically effective amount,” “therapeutically effective amount,” or simply “effective amount” refers to that amount of an RNAi agent to produce a pharmacological, therapeutic, or preventive result.

[0235] In some embodiments, the methods disclosed herein further comprise the step of administering a second therapeutic or treatment in addition to administering an RNAi agent disclosed herein. In some embodiments, the second therapeutic is another RAGE RNAi agent (e.g., a RAGE RNAi agent that targets a different sequence within the RAGE target). In other embodiments, the second therapeutic can be a small molecule drug, an antibody, an antibody fragment, and/or an aptamer.

[0236] In some embodiments, described herein are compositions that include a combination or cocktail of at least two RAGE RNAi agents having different sequences. In some embodiments, the two or more RAGE RNAi agents are each separately and independently linked to targeting groups. In some embodiments, the two or more RAGE RNAi agents are each linked to targeting groups that include or consist of integrin targeting ligands. In some embodiments, the two or more RAGE RNAi agents are each linked to targeting groups that include or consist of αvβ6 integrin targeting ligands.

[0237] Described herein are compositions for delivery of RAGE RNAi agents to pulmonary epithelial cells. Furthermore, compositions for delivery of RAGE RNAi agents to cells, including renal epithelial cells and/or epithelial cells in the GI or reproductive tract and/or and ocular surface epithelial cells in the eye, in vivo, are generally described herein.

[0238] Generally, an effective amount of a RAGE RNAi agent disclosed herein will be in the range of from about 0.01 to about 40 mg/kg of body weight, e.g., from about 0.1 to about 25 mg/kg of body weight. In some embodiments, an effective amount of a RAGE RNAi agent will be in the range of from about 1.0 mg/kg to about 20 mg/kg of body weight per dose. In some embodiments, an effective amount of a RAGE RNAi agent will be in the range of from about 12 mg/kg to about 18 mg/kg of body weight per dose. The amount administered will also likely depend on such variables as the overall health status of the patient, the relative biological efficacy of the compound delivered, the formulation of the drug, the presence and types of excipients in the formulation, and the route of administration. Also, it is to be understood that the initial dosage administered can be increased beyond the above upper level to rapidly achieve the desired blood-level or tissue level, or the initial dosage can be smaller than the optimum. In some embodiments, a dose is administered daily. In some embodiments, a dose is administered weekly. In further embodiments, a dose is administered bi-weekly, ti-weekly, once monthly, or once quarterly (i.e., once every three months).

[0239] For treatment of disease or for formation of a medicament or composition for treatment of a disease, the pharmaceutical compositions described herein including a RAGE RNAi agent can be combined with an excipient or with a second therapeutic agent or treatment including, but not limited to: a second or other RNAi agent, a small molecule drug, an antibody, an antibody fragment, peptide, and/or an aptamer.

[0240] The described RAGE RNAi agents, when added to pharmaceutically acceptable excipients or adjuvants, can be packaged into kits, containers, packs, or dispensers. The pharmaceutical compositions described herein can be packaged in dry powder or aerosol inhalers, other metered-dose inhalers, nebulizers, pre-filled syringes, or vials.

### Methods of Treatment and Inhibition of RAGE Expression

[0241] The RAGE RNAi agents disclosed herein can be used to treat a subject (e.g., a human or other mammal) having a disease or disorder that would benefit from administration of the RNAi agent. In some embodiments, the RNAi agents disclosed herein can be used to treat a subject (e.g., a human) that would benefit from a reduction and/or inhibition in expression of AGER mRNA and/or a reduction in RAGE receptor levels.

[0242] In some embodiments, the RNAi agents disclosed herein can be used to treat a subject (e.g., a human) having a disease or disorder for which the subject would benefit from reduction in RAGE receptors, including but not limited to, pulmonary diseases such as asthma (including severe asthma), acute respiratory distress syndrome, idiopathic pulmonary fibrosis, lung cancer, bronchopulmonary dysplasia, chronic obstructive pulmonary disease (COPD), or cystic fibrosis. In some embodiments the pulmonary diseases is severe asthma. In some embodiments the subject has been previously diagnosed with having cardiovascular disease (atherosclerosis, myocardial infarction, heart failure, peripheral vascular disease), cancer, diabetes, chronic kidney disease, neurodegenerative disease, rheumatoid arthritis, non-alcoholic steatohepatitis, injury caused by certain viral infections including SARS-CoV-2, certain ocular inflammatory conditions, or skeletal muscle wasting. Treatment of a subject can include therapeutic and/or prophylactic treatment. The subject is administered a therapeutically effective amount of any one or more RAGE RNAi agents described herein. The subject can be a human, patient, or human patient. The subject may be an adult, adolescent, child, or infant. Administration of a pharmaceutical composition described herein can be to a human being or animal.

[0243] Increased membrane RAGE activity is known to promote inflammation in tissues. In some embodiments, the described RAGE RNAi agents are used to treat at least one symptom mediated at least in part by a reduction in RAGE levels, in a subject. The subject is administered a therapeutically effective amount of any one or more of the described RAGE RNAi agents. In some embodiments, the subject is administered a prophylactically effective amount of any one or more of the described RNAi agents, thereby treating the subject by preventing or inhibiting the at least one symptom.

[0244] In certain embodiments, the present disclosure provides methods for treatment of diseases, disorders, conditions, or pathological states mediated at least in part by AGER gene expression, in a patient in need thereof, wherein the methods include administering to the patient any of the RAGE RNAi agents described herein.

[0245] In some embodiments, the RAGE RNAi agents are used to treat or manage a clinical presentation or pathological state in a subject, wherein the clinical presentation or pathological state is mediated at least in part by a reduction in RAGE expression. The subject is administered a therapeutically effective amount of one or more of the RAGE RNAi agents or RAGE RNAi agent-containing compositions described herein. In some embodiments, the method comprises administering a composition comprising a RAGE RNAi agent described herein to a subject to be treated.

[0246] In a further aspect, the disclosure features methods of treatment (including prophylactic or preventative treatment) of diseases or symptoms that may be addressed by a reduction in RAGE receptor levels, the methods comprising subcutaneously administering to a subject in need thereof a RAGE RNAi agent that includes an antisense strand comprising the sequence of any of the sequences in Table 2, Table 3, or Table 10. Also described herein are compositions for use in such methods.

[0247] The described RAGE RNAi agents and/or compositions that include RAGE RNAi agents can be used in methods for therapeutic treatment of disease or conditions caused by enhanced or elevated RAGE receptor activity levels. Such methods include administration of a RAGE RNAi agent as described herein to a subject, e.g., a human or animal subject.

[0248] In another aspect, the disclosure provides methods for the treatment (including prophylactic treatment) of a pathological state (such as a condition or disease) mediated at least in part by RAGE expression, wherein the methods include subcutaneously administering to a subject a therapeutically effective amount of an RNAi agent that includes an antisense strand comprising the sequence of any of the sequences in Table 2, Table 3, or Table 10.

[0249] In some embodiments, methods for inhibiting expression of an AGER gene are disclosed herein, wherein the methods include subcutaneously administering to a cell an RNAi agent that includes an antisense strand comprising the sequence of any of the sequences in Table 2, Table 3, or Table 10.

[0250] In some embodiments, methods for the treatment (including prophylactic treatment) of a pathological state mediated at least in part by RAGE expression are disclosed herein, wherein the methods include subcutaneously administering to a subject a therapeutically effective amount of an RNAi agent that includes a sense strand comprising the sequence of any of the sequences in Table 2, Table 4, Table 5, Table 6, or Table 10.

[0251] In some embodiments, methods for inhibiting expression of an AGER gene are disclosed herein, wherein the methods comprise subcutaneously administering to a cell an RNAi agent that includes a sense strand comprising the sequence of any of the sequences in Table 2, Table 4, Table 5, Table 6, or Table 10.

[0252] In some embodiments, methods for the treatment (including prophylactic treatment) of a pathological state mediated at least in part by RAGE expression are disclosed herein, wherein the methods include subcutaneously administering to a subject a therapeutically effective amount of an RNAi agent that includes a sense strand comprising the sequence of any of the sequences in Table 4, Table 5, Table 6, or Table 10, and an antisense strand comprising the sequence of any of the sequences in Table 3 or Table 10.

[0253] In some embodiments, methods for inhibiting expression of an AGER (RAGE) gene are disclosed herein, wherein the methods include subcutaneously administering to a cell an RNAi agent that includes a sense strand comprising the sequence of any of the sequences in Table 4. Table 5, Table 6, or Table 10, and an antisense strand comprising the sequence of any of the sequences in Table 3 or Table 10.

[0254] In some embodiments, methods of inhibiting expression of an AGER gene are disclosed herein, wherein the methods include subcutaneously administering to a subject a RAGE RNAi agent that includes a sense strand consisting of the nucleobase sequence of any of the sequences in Table 4, Table 5, Table 6, or Table 10, and the antisense strand consisting of the nucleobase sequence of any of the sequences in Table 3 or Table 10. In other embodiments, disclosed herein are methods of inhibiting expression of an AGER gene, wherein the methods include subcutaneously administering to a subject a RAGE RNAi agent that includes a sense strand consisting of the modified sequence of any of the modified sequences in Table 4, Table 5, Table 6, or Table 10, and the antisense strand consisting of the modified sequence of any of the modified sequences in Table 3 or Table 10.

[0255] In some embodiments, methods for inhibiting expression of an AGER gene in a cell are disclosed herein, wherein the methods include subcutaneously administering one or more RAGE RNAi agents comprising a duplex structure of one of the duplexes set forth in Tables 7A, 7B, 8, 9A, 9B, and 10.

[0256] In some embodiments, the gene expression level and/or mRNA level of an AGER gene in certain epithelial cells of subject to whom a described RAGE RNAi agent is subcutaneously administered is reduced by at least about 5%, 10%, 15%, 20%, 25%, 30%, 35%, 40%, 45%, 50%, 55%, 60%, 65%, 70%, 75%, 80%, 85%, 90%, 95%, 96%, 97%, 98%, 99%, or greater than 99%, relative to the subject prior to being administered the RAGE RNAi agent or to a subject not receiving the RAGE RNAi agent. In some embodiments, the RAGE receptor or RAGE protein levels in certain epithelial cells of a subject to whom a described RAGE RNAi agent is subcutaneously administered is reduced by at least about 5%, 10%, 15%, 20%, 25%, 30%, 35%, 40%, 45%, 50%, 55%, 60%, 65%, 70%, 75%, 80%, 85%, 90%, 95%, 96%, 97%, 98%, 99%, or greater than 99%, relative to the subject prior to being administered the RAGE RNAi agent or to a subject not receiving the RAGE RNAi agent. The gene expression level, protein level, and/or mRNA level in the subject may be reduced in a cell, group of cells, and/or tissue of the subject. In some embodiments, the AGER mRNA levels in certain epithelial cells subject to whom a described RAGE RNAi agent has been subcutaneously administered is reduced by at least about 30%, 35%, 40%, 45%, 50%, 55%, 60%, 65%, 70%, 75%, 80%, 85%, 90%, 95%, or 98% relative to the subject prior to being administered the RAGE RNAi agent or to a subject not receiving the RAGE RNAi agent.

[0257] A reduction in gene expression, mRNA, and protein levels can be assessed by any methods known in the art. Reduction or decrease in RAGE receptor activity level and/or RAGE protein levels are collectively referred to herein as a decrease in, reduction of, or inhibition of RAGE expression. The Examples set forth herein illustrate known methods for assessing inhibition of RAGE expression and AGER gene expression.

### Cells, Tissues, Organs, and Non-Human Organisms

[0258] Cells, tissues, organs, and non-human organisms that include at least one of the RAGE RNAi agents described herein are contemplated. The cell, tissue, organ, or non-human organism is made by delivering the RNAi agent to the cell, tissue, organ, or non-human organism.

### Additional Illustrative Embodiments

[0259] Provided here are certain additional illustrative embodiments of the disclosed technology. These embodiments are illustrative only and do not limit the scope of the present disclosure or of the claims attached hereto.

[0260] Embodiment 1. A method for inhibiting expression of a receptor for advanced glycation end-products gene, comprising administering to a subject an RNAi agent comprising:
[0261] an antisense strand comprising at least 15 contiguous nucleotides differing by 0 or 1 nucleotides from any one of the antisense strand nucleotide sequences provided in Table 2 or Table 3; and
[0262] a sense strand comprising a nucleotide sequence that is at least partially complementary to the antisense strand.

[0263] Embodiment 2. The method of embodiment 1, wherein the antisense strand comprises nucleotides 2-18 of any one of the sequences provided in Table 2 or Table 3.

[0264] Embodiment 3. The method of embodiment 1 or embodiment 2, wherein the sense strand comprises a nucleotide sequence of at least 17 contiguous nucleotides differing by 0 or 1 nucleotides from any one of the sequences provided in Table 2 or Table 4, and wherein the sense strand has a region of at least 85% complementarity over the 17 contiguous nucleotides to the antisense strand.

[0265] Embodiment 4. The method of any one of embodiments 1-3, wherein at least one nucleotide of the RAGE RNAi agent is a modified nucleotide or includes a modified internucleoside linkage.

[0266] Embodiment 5. The method of any one of embodiments 1-4, wherein all or substantially all of the nucleotides are modified nucleotides.

[0267] Embodiment 6. The Method of any one of embodiments 4-5, wherein the modified nucleotide is selected from the group consisting of: 2′-O-methyl nucleotide, 2′-fluoro nucleotide, 2′-deoxy nucleotide, 2′,3′-seco nucleotide mimic, locked nucleotide, 2′-F-arabino nucleotide, 2′-methoxyethyl nucleotide, abasic nucleotide, ribitol, inverted nucleotide, inverted 2′-O-methyl nucleotide, inverted 2′-deoxy nucleotide, 2′-amino-modified nucleotide, 2′-alkyl-modified nucleotide, morpholino nucleotide, vinyl phosphonate-containing nucleotide, cyclopropyl phosphonate-containing nucleotide, and 3′-O-methyl nucleotide.

[0268] Embodiment 7. The method of embodiment 5, wherein all or substantially all of the nucleotides are modified with 2′-O-methyl nucleotides, 2′-fluoro nucleotides, or combinations thereof.

[0269] Embodiment 8. The method of any one of embodiments 1-7, wherein the antisense strand comprises the nucleotide sequence of any one of the modified sequences provided in Table 3.

[0270] Embodiment 9. The method of any one of embodiments 1-8, wherein the sense strand comprises the nucleotide sequence of any one of the modified sequences provided in Table 4.

[0271] Embodiment 10. The method of embodiment 1, wherein the antisense strand comprises the nucleotide sequence of any one of the modified sequences provided in Table 3 and the sense strand comprises the nucleotide sequence of any one of the modified sequences provided in Table 4.

[0272] Embodiment 11. The method of any one of embodiments 1-10, wherein the sense strand is between 18 and 30 nucleotides in length, and the antisense strand is between 18 and 30 nucleotides in length.

[0273] Embodiment 12. The method of embodiment 11, wherein the sense strand and the antisense strand are each between 18 and 27 nucleotides in length.

[0274] Embodiment 13. The method of embodiment 12, wherein the sense strand and the antisense strand are each between 18 and 24 nucleotides in length.

[0275] Embodiment 14. The method of embodiment 13, wherein the sense strand and the antisense strand are each 21 nucleotides in length.

[0276] Embodiment 15. The method of embodiment 14, wherein the RNAi agent has two blunt ends.

[0277] Embodiment 16. The method of any one of embodiments 1-15, wherein the sense strand comprises one or two terminal caps.

[0278] Embodiment 17. The method of any one of embodiments 1-16, wherein the sense strand comprises one or two inverted abasic residues.

[0279] Embodiment 18. The method of embodiment 1, wherein the RNAi agent is comprised of a sense strand and an antisense strand that form a duplex having the structure of any one of the duplexes in Table 7A, Table 7B, Table 8, Table 9A, Table 9B, or Table 10.

[0280] Embodiment 19. The method of embodiment 18, wherein all or substantially all of the nucleotides are modified nucleotides.

[0281] Embodiment 20. The method of embodiment 1, comprising an antisense strand that consists of, consists essentially of, or comprises a nucleotide sequence that differs by 0 or 1 nucleotides from one of the following nucleotide sequences (5′→3′):

(SEQ ID NO: 35)
UUGUGUUCAGUUUCCAUUC;
(SEQ ID NO: 45)
UGAUGUUUUGAGCACCUAC;
(SEQ ID NO: 49)
UUCCAUUCCUGUUCAUUGC;
(SEQ ID NO: 780)
UUGUGUUCAGUUUCCAUUCCG;
(SEQ ID NO: 796)
UGAUGUUUUGAGCACCUACUC;
or
(SEQ ID NO: 797)
UUCCAUUCCUGUUCAUUGCCU;.

[0282] Embodiment 21. The method of embodiment 20, wherein the sense strand consists of, consists essentially of, or comprises a nucleotide sequence that differs by 0 or 1 nucleotides from one of the following nucleotide sequences (5′→3′):

(SEQ ID NO: 278)
GAAUGGAAACUGAACACAA;
(SEQ ID NO: 288)
GUAGGUGCUCAAAACAUCA;
(SEQ ID NO: 296)
GCAAUGAACAGGAAUIGAA;
(SEQ ID NO: 818)
CGGAAUGGAAACUGAACACAA;
(SEQ ID NO: 838)
GAGUAGGUGCUCAAAACAUCA;
or
(SEQ ID NO: 839)
AGGCAAUGAACAGGAAUIGAA.

[0283] Embodiment 22. The method of embodiment 20 or 21, wherein all or substantially all of the nucleotides are modified nucleotides.

[0284] Embodiment 23. The method of embodiment 1, comprising an antisense strand that comprises, consists of, or consists essentially of a modified nucleotide sequence that differs by 0 or 1 nucleotides from one of the following nucleotide sequences (5′→3′):

(SEQ ID NO: 521)
usUfsgsUfgUfuCfaGfuUfuCfcAfuUfcCfsg;
(SEQ ID NO: 522)
cPrpusUfsgsUfgUfuCfaGfuUfuCfcAfuUfcCfsg;
(SEQ ID NO: 580)
usGfsasuguuuugaGfcAfcCfuacusc;
(SEQ ID NO: 581)
cPrpusGfsasuguuuugaGfcAfcCfuacusc;
(SEQ ID NO: 547)
usUfscsCfaUfuCfcUfgUfuCfaUfuGfcCfsu;

wherein a, c, g, and u represent 2′-O-methyl adenosine, 2′-O-methyl cytidine, 2′-O-methyl guanosine, and 2′-O-methyl uridine, respectively; Af, Cf, Gf, and Uf represent 2′-fluoro adenosine, 2′-fluoro cytidine, 2′-fluoro guanosine, and 2′-fluoro uridine, respectively; cPrpu represents a 5′-cyclopropyl phosphonate-2′-O-methyl uridine; s represents a phosphorothioate linkage; and wherein all or substantially all of the nucleotides on the sense strand are modified nucleotides.

[0285] Embodiment 24. The method of embodiment 1, wherein the sense strand comprises, consists of, or consists essentially of a modified nucleotide sequence that differs by 0 or 1 nucleotides from one of the following nucleotide sequences (5′→3′):

(SEQ ID NO: 671)
gsaguagGfuGfcUfcaaaacauca;
(SEQ ID NO: 627)
asggcaaugAfAfCfaggaauigaa;
(SEQ ID NO: 602)
csggaauggAfAfAfcugaacacaa;

wherein a, c, g, i, and u represent 2′-O-methyl adenosine, 2′-O-methyl cytidine, 2′-O-methyl guanosine, 2′-O-methyl inosine, and 2′-O-methyl uridine, respectively; Af, Cf, Gf, and Uf represent 2′-fluoro adenosine, 2′-fluoro cytidine, 2′-fluoro guanosine, and 2′-fluoro uridine, respectively; and s represents a phosphorothioate linkage; and wherein all or substantially all of the nucleotides on the antisense strand are modified nucleotides.

[0286] Embodiment 25. The method of any one of embodiments 20-24, wherein the sense strand further includes inverted abasic residues at the 3′ terminal end of the nucleotide sequence, at the 5′ end of the nucleotide sequence, or at both.

[0287] Embodiment 26. The method of any one of embodiments 1-25, wherein the RNAi agent is linked to a targeting ligand.

[0288] Embodiment 27. The method of embodiment 26, wherein the targeting ligand has affinity for a cell receptor expressed on an epithelial cell.

[0289] Embodiment 28. The method of embodiment 27, wherein the targeting ligand comprises an integrin targeting ligand.

[0290] Embodiment 29. The method of embodiment 28, wherein the integrin targeting ligand is an αvβ6 integrin targeting ligand.

[0291] Embodiment 30. The method of embodiment 29, wherein the targeting ligand comprises the structure:

[chemical structure]

or a pharmaceutically acceptable salt thereof, or

[chemical structure]

or a pharmaceutically acceptable salt thereof, wherein [symbol] indicates the point of connection to the RNAi agent.

[0292] Embodiment 31. The method of any one of embodiments 26-29, wherein the targeting ligand has a structure selected from the group consisting of:

[chemical structure]

[chemical structure]

[chemical structure]

[chemical structure]

[chemical structure]

[chemical structure]

[chemical structure]

[chemical structure]

[chemical structure]

wherein [symbol] indicates the point of connection to the RNAi agent.

[0293] Embodiment 32. The method of embodiment 31, wherein RNAi agent is conjugated to a targeting ligand having the following structure:

[chemical structure]

[0294] Embodiment 33. The method of any one of embodiments 26-29, wherein the targeting ligand has the following structure:

[chemical structure]

[0295] Embodiment 34. The method of any one of embodiments 26-33, wherein the targeting ligand is conjugated to the sense strand.

[0296] Embodiment 35. The method of embodiment 34, wherein the targeting ligand is conjugated to the 5′ terminal end of the sense strand.

[0297] Embodiment 36. The method of any one of embodiments 1-35, wherein the RNAi agent is administered at a dose of about 0.01 mg/kg to about 40.0 mg/kg of body weight of the subject.

[0298] Embodiment 37. The method of embodiment 36, wherein the RNAi agent is administered at a dose of about 0.1 mg/kg to about 35.0 mg/kg of body weight of the subject.

[0299] Embodiment 38. The method of embodiment 36, wherein the RNAi agent is administered at a dose of about 1.0 mg/kg to about 30.0 mg/kg of body weight of the subject.

[0300] Embodiment 39. The method of embodiment 36, wherein the RNAi agent is administered at a dose of about 2.0 mg/kg to about 25.0 mg/kg of body weight of the subject.

[0301] Embodiment 40. The method of embodiment 36, wherein the RNAi agent is administered at a dose of about 4.0 mg/kg to about 20.0 mg/kg of body weight of the subject.

[0302] Embodiment 41. The method of embodiment 36, wherein the RNAi agent is administered at a dose of about 5.0 mg/kg to about 18.0 mg/kg of body weight of the subject.

[0303] Embodiment 42. The method of embodiment 36, wherein the RNAi agent is administered at a dose of about 10.0 mg/kg to about 16.0 mg/kg of body weight of the subject.

[0304] Embodiment 43. The method of embodiment 36, wherein the RNAi agent is administered at a dose of about 12.0 mg/kg to about 15.0 mg/kg of body weight of the subject.

[0305] Embodiment 44. A method of treating one or more symptoms or diseases associated with enhanced or elevated membrane RAGE activity levels, the method comprising subcutaneously administering to a human subject in need thereof a therapeutically effective amount of an RNAi agent comprising:
[0306] a) an antisense strand comprising at least 17 contiguous nucleotides differing by 0 or 1 nucleotides from any one of the sequences provided in Table 2 or Table 3; and
[0307] b) a sense strand comprising a nucleotide sequence that is at least partially complementary to the antisense strand.

[0308] Embodiment 45. The method of embodiment 44, wherein the disease is a respiratory disease.

[0309] Embodiment 46. The method of embodiment 45, wherein the respiratory disease is cystic fibrosis, chronic bronchitis, non-cystic fibrosis bronchiectasis, chronic obstructive pulmonary disease (COPD), asthma, respiratory tract infections, primary ciliary dyskinesia, or lung carcinoma cystic fibrosis.

[0310] Embodiment 47. The method of embodiment 46, wherein the disease is chronic obstructive pulmonary disease (COPD).

[0311] Embodiment 48. The method of embodiment 44, wherein the disease is a viral respiratory disease.

[0312] Embodiment 49. The method of embodiment 48, wherein the disease is SARS-CoV-2.

[0313] Embodiment 50. The method of embodiment 44, wherein the disease is obesity.

[0314] Embodiment 51. The method of any of embodiments 44-50, wherein the RNAi agent is administered in two or more doses.

[0315] Embodiment 52. The method of embodiment 51, wherein the two or more doses are administered weekly.

[0316] Embodiment 53. The method of embodiment 51, wherein the two or more doses are administered bi-weekly.

[0317] Embodiment 54. The method of embodiment 51, wherein the two or more doses are administered every four weeks.

[0318] Embodiment 55. Use of an RNAi agent RNAi agent comprising:
[0319] a) an antisense strand comprising at least 17 contiguous nucleotides differing by 0 or 1 nucleotides from any one of the sequences provided in Table 2 or Table 3; and
[0320] b) a sense strand comprising a nucleotide sequence that is at least partially complementary to the antisense strand;
[0321] for the treatment of a disease, disorder, or symptom that is mediated at least in part by membrane RAGE activity and/or AGER gene expression, wherein the RNAi agent is administered subcutaneously.

[0322] Embodiment 56. The use of embodiment 55, wherein the disease is a respiratory disease.

[0323] Embodiment 57. The use of embodiment 56, wherein the respiratory disease is cystic fibrosis, chronic bronchitis, non-cystic fibrosis bronchiectasis, chronic obstructive pulmonary disease (COPD), asthma, respiratory tract infections, primary ciliary dyskinesia, or lung carcinoma cystic fibrosis.

[0324] Embodiment 58. The use of embodiment 55, wherein the respiratory disease is a viral respiratory disease.

[0325] Embodiment 59. The use of embodiment 58, wherein the disease is SARS-CoV-2.

[0326] Embodiment 60. The use of embodiment 55, wherein the disease is pulmonary inflammation.

[0327] Embodiment 61. The use of embodiment 55, wherein the disease is obesity.

[0328] The above provided embodiments and items are now illustrated with the following, non-limiting examples.

### EXAMPLES

### Example 1. Synthesis of RAGE RNAi Agents

[0329] RAGE RNAi agent duplexes disclosed herein were synthesized in accordance with the following:

### A. Synthesis

[0330] The sense and antisense strands of the RAGE RNAi agents were synthesized according to phosphoramidite technology on solid phase used in oligonucleotide synthesis. Depending on the scale, a MerMade96E® (Bioautomation), a MerMadel2® (Bioautomation), or an OP Pilot 100 (GE Healthcare) was used. Syntheses were performed on a solid support made of controlled pore glass (CPG, 500 Å or 600A, obtained from Prime Synthesis, Aston, PA, USA). All RNA and 2′-modified RNA phosphoramidites were purchased from Thermo Fisher Scientific (Milwaukee, WI, USA). The monomer positioned at the 3′ end of the respective strand was attached to the solid support as a starting point for synthesis. Specifically, the 2′-O-methyl phosphoramidites that were used included the following: (5′-O-dimethoxytrityl-N⁶-(benzoyl)-2′-O-methyl-adenosine-3′-O-(2-cyanoethyl-N,N-diisopropylamino) phosphoramidite, 5′-O-dimethoxy-trityl-N⁴-(acetyl)-2′-O-methyl-cytidine-3′-O-(2-cyanoethyl-N,N-diisopropyl-amino) phosphoramidite, (5′-O-dimethoxytrityl-N²-(isobutyryl)-2′-O-methyl-guanosine-3′-O-(2-cyanoethyl-N,N-diisopropylamino) phosphoramidite, and 5′-O-dimethoxytrityl-2′-O-methyl-uridine-3′-O-(2-cyanoethyl-N,N-diisopropylamino) phosphoramidite. The 2′-deoxy-2′-fluoro-phosphoramidites carried the same protecting groups as the 2′-O-methyl RNA amidites. 5′-dimethoxytrityl-2′-O-methyl-inosine-3′-O-(2-cyanoethyl-N,N-diisopropylamino) phosphoramidites were purchased from Glen Research (Virginia). The inverted abasic (3′-O-dimethoxytrityl-2′-deoxyribose-5′-O-(2-cyanoethyl-N,N-diisopropylamino) phosphoramidites were purchased from ChemGenes (Wilmington, MA, USA). The following UNA phosphoramidites were used: 5′-(4,4′-Dimethoxytrityl)-N6-(benzoyl)-2′,3′-seco-adenosine, 2′-benzoyl-3′-[(2-cyanoethyl)-(N,N-diisopropyl)]-phosphoramidite, 5′-(4,4′-Dimethoxytrityl)-N-acetyl-2′,3′-seco-cytosine, 2′-benzoyl-3′-[(2-cyanoethyl)-(N,N-diiso-propyl)]-phosphoramidite, 5′-(4,4′-Dimethoxytrityl)-N-isobutyryl-2′,3′-seco-guanosine, 2′-benzoyl-3′-[(2-cyanoethyl)-(N,N-diisopropyl)]-phosphoramidite, and 5′-(4,4′-Dimethoxy-trityl)-2′,3′-seco-uridine, 2′-benzoyl-3′-[(2-cyanoethyl)-(N,N-diiso-propyl)]-phosphoramidite. TFA aminolink phosphoramidites were also commercially purchased (ThermoFisher). Linker L6 was purchased as propargyl-PEG5-NHS from BroadPharm (catalog #BP-20907) and coupled to the NH₂-C6 group from an aminolink phosphoramidite to form -L6-C6-, using standard coupling conditions. The linker Alk-cyHex was similarly commercially purchased from Lumiprobe (alkyne phosphoramidite, 5′-terminal) as a propargyl-containing compound phosphoramidite compound to form the linker -Alk-cyHex-. In each case, phosphorothioate linkages were introduced as specified using the conditions set forth herein. The cyclopropyl phosphonate phosphoramidites were synthesized in accordance with International Patent Application Publication No. WO 2017/214112.

[0331] Tri-alkyne-containing phosphoramidites were dissolved in anhydrous dichloromethane or anhydrous acetonitrile (50 mM), while all other amidites were dissolved in anhydrous acetonitrile (50 mM) and molecular sieves (3 Å) were added. 5-Benzylthio-1H-tetrazole (BTT, 250 mM in acetonitrile) or 5-Ethylthio-1H-tetrazole (ETT, 250 mM in acetonitrile) was used as activator solution. Coupling times were 10 minutes (RNA), 90 seconds (2′ O-Me), and 60 seconds (2′ F). In order to introduce phosphorothioate linkages, a 100 mM solution of 3-phenyl 1,2,4-dithiazoline-5-one (POS, obtained from PolyOrg, Inc., Leominster, MA, USA) in anhydrous acetonitrile was employed.

[0332] Alternatively, tri-alkyne moieties were introduced post-synthetically (see section E, below). For this route, the sense strand was functionalized with a 5′ and/or 3′ terminal nucleotide containing a primary amine. TFA aminolink phosphoramidite was dissolved in anhydrous acetonitrile (50 mM) and molecular sieves (3 Å) were added. 5-Benzylthio-1H-tetrazole (BTT, 250 mM in acetonitrile) or 5-Ethylthio-1H-tetrazole (ETT, 250 mM in acetonitrile) was used as activator solution. Coupling times were 10 minutes (RNA), 90 seconds (2′ O-Me), and 60 seconds (2′ F). In order to introduce phosphorothioate linkages, a 100 mM solution of 3-phenyl 1,2,4-dithiazoline-5-one (POS, obtained from PolyOrg, Inc., Leominster, MA, USA) in anhydrous acetonitrile was employed.

### B. Cleavage and Deprotection of Support Bound Oligomer

[0333] After finalization of the solid phase synthesis. the dried solid support was treated with a 1:1 volume solution of 40 wt. % methylamine in water and 28% to 31% ammonium hydroxide solution (Aldrich) for 1.5 hours at 30° C. The solution was evaporated and the solid residue was reconstituted in water (see below).

### C. Purification

[0334] Crude oligomers were purified by anionic exchange HPLC using a TSKgel SuperQ-5PW 13 μm column and Shimadzu LC-8 system. Buffer A was 20 mM Tris, 5 mM EDTA, pH 9.0 and contained 20% Acetonitrile and buffer B was the same as buffer A with the addition of 1.5 M sodium chloride. UV traces at 260 nm were recorded. Appropriate fractions were pooled then run on size exclusion HPLC using a GE Healthcare XK 16/40 column packed with Sephadex G-25 fine with a running buffer of 100 mM ammonium bicarbonate, pH 6.7 and 20% Acetonitrile or filtered water. Alternatively, pooled fractions were desalted and exchanged into an appropriate buffer or solvent system via tangential flow filtration.

### D. Annealing

[0335] Complementary strands were mixed by combining equimolar RNA solutions (sense and antisense) in 1×PBS (Phosphate-Buffered Saline, 1×, Corning, Cellgro) to form the RNAi agents. Some RNAi agents were lyophilized and stored at −15 to −25° C. Duplex concentration was determined by measuring the solution absorbance on a UV-Vis spectrometer in 1×PBS. The solution absorbance at 260 nm was then multiplied by a conversion factor (0.050 mg/(mL·cm)) and the dilution factor to determine the duplex concentration.

### E. Conjugation of Tri-alkyne Linker

[0336] In some embodiments a tri-alkyne linker is conjugated to the sense strand of the RNAi agent on resin as a phosphoramidite (see Example 1G for the synthesis of an example tri-alkyne linker phosphoramidite and Example 1A for the conjugation of the phosphoramidite.). In other embodiments, a tri-alkyne linker may be conjugated to the sense strand following cleavage from the resin, described as follows: either prior to or after annealing, in some embodiments, the 5′ or 3′ amine functionalized sense strand is conjugated to a tri-alkyne linker. An example tri-alkyne linker structure that can be used in forming the constructs disclosed herein is as follows:

[chemical structure]

To conjugate the tri-alkyne linker to the annealed duplex, amine-functionalized duplex was dissolved in 90% DMSO/10% H₂O, at ˜50-70 mg/mL. 40 equivalents triethylamine was added, followed by 3 equivalents tri-alkyne-PNP. Once complete, the conjugate was precipitated twice in a solvent system of 1× phosphate buffered saline/acetonitrile (1:14 ratio), and dried.

### F. Synthesis of Targeting Ligand SM6.1

### ((S)-3-(4-(4-((14-azido-3,6,9,12-tetraoxatetradecyl)oxy)naphthalen-1-yl)phenyl)-3-(2-(4-((4-methylpyridin-2-yl)amino)butanamido)acetamido)propanoic acid)

[chemical structure]

[0337] Compound 5 (tert-Butyl(4-methylpyridin-2-yl)carbamate) (0.501 g, 2.406 mmol, 1 equiv.) was dissolved in DMF (17 mL). To the mixture was added NaH (0.116 mg, 3.01 mmol, 1.25 eq, 60% dispersion in oil) The mixture stirred for 10 min before adding Compound 20 (Ethyl 4-Bromobutyrate (0.745 g, 3.82 mmol, 0.547 mL)) (Sigma 167118). After 3 hours the reaction was quenched with ethanol (18 mL) and concentrated. The concentrate was dissolved in DCM (50 mL) and washed with saturated aq. NaCl solution (1×50 mL), dried over Na₂SO₄, filtered and concentrated. The product was purified on silica column, gradient 0-5% Methanol in DCM.

[chemical structure]

[0338] Compound 21 was dissolved (0.80 g, 2.378 mmol) in 100 mL of Acetone: 0.1 M NaOH [1:1]. The reaction was monitored by TLC (5% ethyl acetate in hexane). The organics were concentrated away, and the residue was acidified to pH 3-4 with 0.3 M Citric Acid (40 mL). The product was extracted with DCM (3×75 mL). The organics were pooled, dried over Na₂SO₄, filtered and concentrated. The product was used without further purification.

[chemical structure]

[0339] To a solution of Compound 22 (1.1 g, 3.95 mmol, 1 equiv.), Compound 45 (595 mg, 4.74 mmol, 1.2 equiv.), and TBTU (1.52 g, 4.74 mmol, 1.2 equiv.) in anhydrous DMF (10 mL) was added diisopropylethylamine (2.06 mL, 11.85 mmol, 3 equiv.) at 0° C. The reaction mixture was warmed to room temperature and stirred 3 hours. The reaction was quenched by saturated NaHCO₃ solution (10 mL). The aqueous phase was extracted with ethyl acetate (3×10 mL) and the organic phase was combined, dried over anhydrous Na₂SO₄, and concentrated. The product was separated by CombiFlash® using silica gel as the stationary phase. LC-MS: calculated [M+H]+ 366.20, found 367.

[chemical structure]

[0340] To a solution of compound 61 (2 g, 8.96 mmol, 1 equiv.), and compound 62 (2.13 mL, 17.93 mmol, 2 equiv.) in anhydrous DMF (10 mL) was added K₂CO₃ (2.48 g, 17.93 mmol, 2 equiv.) at 0° C. The reaction mixture was warmed to room temperature and stirred overnight. The reaction was quenched by water (10 mL). The aqueous phase was extracted with ethyl acetate (3×10 mL) and the organic phase was combined, dried over anhydrous Na₂SO₄, and concentrated. The product was separated by CombiFlash® using silica gel as the stationary phase.

[chemical structure]

[0341] To a solution of compound 60 (1.77 g, 4.84 mmol, 1 equiv.) in THF (5 mL) and H₂O (5 mL) was added lithium hydroxide monohydrate (0.61 g, 14.53 mmol, 3 equiv.) portion-wise at 0° C. The reaction mixture was warmed to room temperature. After stirring at room temperature for 3 hours, the reaction mixture was acidified by HCl (6 N) to pH 3.0. The aqueous phase was extracted with ethyl acetate (3×20 mL) and the organic layer was combined, dried over Na₂SO₄, and concentrated. LC-MS: calculated [M+H]+ 352.18, found 352.

[chemical structure]

[0342] To a solution of compound 63 (1.88 g, 6.0 mmol, 1.0 equiv.) in anhydrous THF (20 mL) was added n-BuLi in hexane (3.6 mL, 9.0 mmol, 1.5 equiv.) drop-wise at −78° C. The reaction was kept at −78° C. for another 1 hour. Triisopropylborate (2.08 mL, 9.0 mmol, 1.5 equiv.) was then added into the mixture at −78° C. The reaction was then warmed up to room temperature and stirred for another 1 hour. The reaction was quenched by saturated NH₄Cl solution (20 mL) and the pH was adjusted to 3. The aqueous phase was extracted with EtOAc (3×20 mL) and the organic phase was combined, dried over Na₂SO₄, and concentrated.

[chemical structure]

[0343] Compound 12 (300 mg, 0.837 mmol, 1.0 equiv.), Compound 65 (349 mg, 1.256 mmol, 1.5 equiv.), XPhos Pd G2 (13 mg, 0.0167 mmol, 0.02 equiv.), and K₃PO₄ (355 mg, 1.675 mmol, 2.0 equiv.) were mixed in a round-bottom flask. The flask was sealed with a screw-cap septum, and then evacuated and backfilled with nitrogen (this process was repeated a total of 3 times). Then, THF (8 mL) and water (2 mL) were added via syringe. The mixture was bubbled with nitrogen for 20 min and the reaction was kept at room temperature for overnight. The reaction was quenched with water (10 mL), and the aqueous phase was extracted with ethyl acetate (3×10 mL). The organic phase was dried over Na₂SO₄, concentrated, and purified via CombiFlash® using silica gel as the stationary phase and was eluted with 15% EtOAc in hexane. LC-MS: calculated [M+H]+ 512.24, found 512.56.

[chemical structure]

[0344] Compound 66 (858 mg, 1.677 mmol, 1.0 equiv.) was cooled by ice bath. HCl in dioxane (8.4 mL, 33.54 mmol, 20 equiv.) was added into the flask. The reaction was warmed to room temperature and stirred for another 1 hr. The solvent was removed by rotary evaporator and the product was directly used without further purification. LC-MS: calculated [M+H]+ 412.18, found 412.46.

[chemical structure]

[0345] To a solution of compound 64 (500 mg, 1.423 mmol, 1 equiv.), compound 67 (669 mg, 1.494 mmol, 1.05 equiv.), and TBTU (548 mg, 0.492 mmol, 1.2 equiv.) in anhydrous DMF (15 mL) was added diisopropylethylamine (0.744 mL, 4.268 mmol, 3 equiv.) at 0° C. The reaction mixture was warmed to room temperature and stirred for another 1 hr. The reaction was quenched by saturated NaHCO₃ aqueous solution (10 mL) and the product was extracted with ethyl acetate (3×20 mL). The organic phase was combined, dried over Na₂SO₄, and concentrated. The product was purified by CombiFlash® using silica gel as the stationary phase and was eluted with 3-4% methanol in DCM. The yield was 96.23%. LC-MS: calculated [M+H]+ 745.35, found 746.08.

[chemical structure]

[0346] To a solution of compound 68 (1.02 g, 1.369 mmol, 1 equiv.) in ethyl acetate (10 mL) was added 10% Pd/C (0.15 g, 50% H₂O) at room temperature. The reaction mixture was warmed to room temperature and the reaction was monitored by LC-MS. The reaction was kept at room temperature overnight. The solids were filtered through Celite® and the solvent was removed by rotary evaporator. The product was directly used without further purification. LC-MS: [M+H]+ 655.31, found 655.87.

[chemical structure]

[0347] To a solution of compound 69 (100 mg, 0.152 mmol, 1 equiv.) and azido-PEG₅-OTs (128 mg, 0.305 mmol, 2 equiv.) in anhydrous DMF (2 mL) was added K₂CO₃ (42 mg, 0.305 mmol, 2 equiv.) at 0° C. The reaction mixture was stirred for 6 hours at 80° C. The reaction was quenched by saturated NaHCO₃ solution and the aqueous layer was extracted with ethyl acetate (3×10 mL). The organic phase was combined, dried over Na₂SO₄, and concentrated. LC-MS: calculated [M+H]+ 900.40, found 901.46.

[chemical structure]

[0348] To a solution of compound 72 (59 mg, 0.0656 mmol, 1.0 equiv.) in THF (2 mL) and water (2 mL) was added lithium hydroxide (5 mg, 0.197 mmol, 3.0 equiv.) at room temperature. The mixture was stirred at room temperature for another 1 hr. The pH was adjusted to 3.0 by HCl (6N) and the aqueous phase was extracted with EtOAc (3×10 mL). The organic phase was combined, dried over Na₂SO₄, and concentrated. TFA (0.5 mL) and DCM (0.5 mL) was added into the residue and the mixture was stirred at room temperature for another 3 hr. The solvent was removed by rotary evaporator. LC-MS: calculated [M+H]+ 786.37, found 786.95.

### G. Synthesis of TriAlk 14

[0349] TriAlk14 and (TriAlk14)s as shown in Table 11, above, may be synthesized using the synthetic route shown below. Compound 14 may be added to the sense strand as a phosphoramidite using standard oligonucleotide synthesis techniques, or compound 22 may be conjugated to the sense strand comprising an amine in an amide coupling reaction.

[chemical structure]

[0350] To a 3-L jacketed reactor was added 500 mL DCM and 4 (75.0 g, 0.16 mol). The internal temperature of the reaction was cooled to 0° C. and TBTU (170.0 g, 0.53 mol) was added. The suspension was then treated with the amine 5 (75.5 g, 0.53 mol) dropwise keeping the internal temperature less than 5° C. The reaction was then treated with DIPEA (72.3 g, 0.56 mol) slowly, keeping the internal temperature less than 5° C. After the addition was complete, the reaction was warmed up to 23° C. over 1 hour, and allowed to stir for 3 hours. A 10% kicker charge of all three reagents were added and allowed to stir an additional 3 hours. The reaction was deemed complete when <1% of 4 remained. The reaction mixture was washed with saturated ammonium chloride solution (2×500 mL) and once with saturated sodium bicarbonate solution (500 mL). The organic layer was then dried over sodium sulfate and concentrated to an oil. The mass of the crude oil was 188 g which contained 72% 6 by QNMR. The crude oil was carried to the next step. Calculated mass for C₄₆H₆₀N₄O₁₁=845.0 m/z. Found [M+H]=846.0.

[chemical structure]

[0351] The 121.2 g of crude oil containing 72 wt % compound 6 (86.0 g, 0.10 mol) was dissolved in DMF (344 mL) and treated with TEA (86 mL, 20 v/v %), keeping the internal temperature below 23° C. The formation of dibenzofulvene (DBF) relative to the consumption of Fmoc-amine 6 was monitored via HPLC method 1 (FIG. 2) and the reaction was complete within 10 hours. To the solution was added glutaric anhydride (12.8 g, 0.11 mol) and the intermediate amine 7 was converted to compound 8 within 2 hours. Upon completion, the DMF and TEA were removed at 30° C. under reduced pressure resulting in 100 g of a crude oil. Due to the high solubility of compound 7 in water, an aqueous workup could not be used, and chromatography is the only way to remove DBF, TMU, and glutaric anhydride. The crude oil (75 g) was purified on a Teledyne ISCO Combi-Flash® purification system in three portions. The crude oil (25 g) was loaded onto a 330 g silica column and eluted from 0-20% methanol/DCM over 30 minutes resulting in 42 g of compound 8 (54% yield over 3 steps). Calculated mass for C₃₆H₅₅N₄O₁₂=736.4 m/z. Found [M+H]=737.0.

[chemical structure]

[0352] Compound 8 (42.0 g, 0.057 mol) was co-stripped with 10 volumes of acetonitrile prior to use to remove any residual methanol from chromatography solvents. The oil was redissolved in DMF (210 mL) and cooled to 0° C. The solution was treated with 4-nitrophenol (8.7 g, 0.063 moL) followed by EDC-hydrochloride (12.0 g, 0.063 mol) and found to reach completion within 10 hours. The solution was cooled to 0° C. and 10 volumes ethyl acetate was added followed by 10 volumes saturated ammonium chloride solution, keeping the internal temperature below 15° C. The layers were allowed to separate and the ethyl acetate layer was washed with brine. The combined aqueous layers were extracted twice with 5 volumes ethyl acetate. The combined organic layers were dried over sodium sulfate and concentrated to an oil. The crude oil (55 g) was purified on a Teledyne ISCO Combi-Flash® purification system in three portions. The crude oil (25 g) was loaded onto a 330 g silica column and eluted from 0-10% methanol/DCM over 30 minutes resulting in 22 g of pure 9 (Compound 22) (50% yield). Calculated mass for C₄₂H₅₉N₅O₁₄=857.4 m/z. Found [M+H]=858.0.

[chemical structure]

[0353] A solution of ester 9 (49.0 g, 57.1 mmol) and 6-amino-1-hexanol (7.36 g, 6.28 mmol) in dichloromethane (3 volumes) was treated with triethylamine (11.56 g, 111.4 mmol) dropwise. The reaction was monitored by observing the disappearance of compound 9 on HPLC Method 1 and was found to be complete in 10 minutes. The crude reaction mixture was diluted with 5 volumes dichloromethane and washed with saturated ammonium chloride (5 volumes) and brine (5 volumes). The organic layer was dried over sodium sulfate and concentrated to an oil. The crude oil was purified on a Teledyne ISCO Combi-Flash® purification system using a 330 g silica column. The 4-nitrophenol was eluted with 100% ethyl acetate and 10 was flushed from the column using 20% methanol/DCM resulting in a colorless oil (39 g, 81% yield). Calculated mass for C₄₂H₆₉N₅O₁₂=836.0 m/z. Found [M+H]=837.0.

[chemical structure]

[0354] Alcohol 10 was co-stripped twice with 10 volumes of acetonitrile to remove any residual methanol from chromatography solvents and once more with dry dichloromethane (KF<60 ppm) to remove trace water. The alcohol 10 (2.30 g, 2.8 mmol) was dissolved in 5 volumes dry dichloromethane (KF<50 ppm) and treated with diisopropylammonium tetrazolide (188 mg, 1.1 mmol). The solution was cooled to 0° C. and treated with 2-cyanoethyl N,N,N′,N′-tetraisopropylphosphoramidite (1.00 g, 3.3 mmol) dropwise. The solution was removed from ice-bath and stirred at 20° C. The reaction was found to be complete within 3-6 hours. The reaction mixture was cooled to 0° C. and treated with 10 volumes of a 1:1 solution of saturated ammonium bicarbonate/brine and then warmed to ambient over 1 minute and allowed to stir an additional 3 minutes at 20° C. The biphasic mixture was transferred to a separatory funnel and 10 volumes of dichloromethane was added. The organic layer was separated and washed with 10 volumes of saturated sodium bicarbonate solution to hydrolyze unreacted bis-phosphorous reagent. The organic layer was dried over sodium sulfate and concentrated to an oil resulting in 3.08 g of 94 wt % Compound 14. Calculated mass for C₅₁H₈₆N₇O₁₃P=1035.6 m/z. Found [M+H]=1036.

### H. Conjugation of Targeting Ligands

[0355] Either prior to or after annealing, the 5′ or 3′ tridentate alkyne functionalized sense strand is conjugated to targeting ligands. The following example describes the conjugation of targeting ligands to the annealed duplex: Stock solutions of 0.5M Tris(3-hydroxypropyltriazolylmethyl)amine (THPTA), 0.5M of Cu(II) sulfate pentahydrate (Cu(II)SO₄·5H₂O) and 2M solution of sodium ascorbate were prepared in deionized water. A 75 mg/mL solution in DMSO of targeting ligand was made. In a 1.5 mL centrifuge tube containing tri-alkyne functionalized duplex (3 mg, 75 μL, 40 mg/mL in deionized water, ˜15,000 g/mol), 25 μL of 1M Hepes pH 8.5 buffer is added. After vortexing, 35 μL of DMSO was added and the solution is vortexed. Targeting ligand was added to the reaction (6 equivalents/duplex, 2 equivalents/alkyne, ˜15 μL) and the solution is vortexed. Using pH paper, pH was checked and confirmed to be pH ˜8. In a separate 1.5 mL centrifuge tube, 50 μL of 0.5M THPTA was mixed with 10 uL of 0.5M Cu(II)SO₄·5H₂O, vortexed, and incubated at room temp for 5 min. After 5 min, THPTA/Cu solution (7.2 μL, 6 equivalents 5:1 THPTA:Cu) was added to the reaction vial, and vortexed. Immediately afterwards, 2M ascorbate (5 μL, 50 equivalents per duplex, 16.7 per alkyne) was added to the reaction vial and vortexed. Once the reaction was complete (typically complete in 0.5-1 h), the reaction was immediately purified by non-denaturing anion exchange chromatography.

### Example 2. In Vivo Subcutaneous Administration of RAGE RNAi Agents in Rats

[0356] On study day 1, male Sprague Dawley were administered a subcutaneous injection of isotonic saline or of one of the following RAGE RNAi agents at an injection volume of 1 mL/kg:

TABLE 12
RAGE RNAi Agent and Dosing for Example 2

| | AC Duplex |
|---|---|
| Group ID | Number |
| Group 1 (isotonic saline) | N/A |
| Group 2 (30 mg/kg Tri-SM6.1-αvβ6-AD07475) | AC000292 |
| Group 3 (15 mg/kg Tri-SM6.1-αvβ6-AD07475) | AC000292 |
| Group 4 (7.5 mg/kg Tri-SM6.1-αvβ6-AD07475) | AC000292 |
| Group 5 (3.75 mg/kg Tri-SM6.1-αvβ6-AD07475) | AC000292 |
| Group 6 (2.0 mg/kg Tri-SM6.1-αvβ6-AD07475) | AC000292 |
| Group 7 (1.0 mg/kg Tri-SM6.1-αvβ6-AD07475) | AC000292 |

[0357] As noted in Table 12, each of the RAGE RNAi agents were conjugated to a tridentate small molecule αvβ6 epithelial cell targeting ligand (Tri-SM6.1, see FIG. 1) at the 5′ terminal end of the sense strand, formulated in isotonic saline.

[0358] The chemically modified sequences for RAGE RNAi agent AD07475 is shown in Table 7B (showing duplex), Table 3 (showing respective antisense strand), and Table 5 (showing respective sense strand with linker but without tridentate small molecule αvβ6 epithelial cell targeting ligand (Tri-SM6.1)).

[0359] Six (n=6) rats were dosed per group. Rats were sacrificed on study day 8, and total RNA was isolated from both lungs following collection and homogenization. Rat AGER mRNA expression was quantitated by probe-based quantitative PCR, normalized to rat GAPDH expression, and expressed as fraction of vehicle control group (geometric mean, +/−95% confidence interval).

TABLE 13
Average Relative Rat RAGE mRNA Expression at
Sacrifice (Day 8) in Example 2.

| | Average | | |
|---|---|---|---|
| | Relative | | |
| | mAGER | | |
| | mRNA | | |
| | Expression | Low | High |
| Group ID | (n = 5) | (error) | (error) |
| Group 1 (isotonic saline) | 1.000 | 0.166 | 0.199 |
| Group 2 (30 mg/kg Tri-SM6.1-αvβ6- | 0.230 | 0.070 | 0.101 |
| AD07475) | | | |
| Group 3 (15 mg/kg Tri-SM6.1-αvβ6- | 0.293 | 0.034 | 0.039 |
| AD07475) | | | |
| Group 4 (7.5 mg/kg Tri-SM6.1-αvβ6- | 0.464 | 0.103 | 0.132 |
| AD07475) | | | |
| Group 5 (3.75 mg/kg Tri-SM6.1- | 0.500 | 0.072 | 0.084 |
| αvβ6-AD07475) | | | |
| Group 6 (2.0 mg/kg Tri-SM6.1-αvβ6- | 0.731 | 0.140 | 0.173 |
| AD07475) | | | |
| Group 7 (1.0 mg/kg Tri-SM6.1-αvβ6- | | | |
| AD07475) | 0.912 | 0.166 | 0.203 |

[0360] As shown in the data in Table 13 above, the RAGE RNAi agent AC000292 showed dose-dependent knockdown in rats as early as day 8 when administered subcutaneously.

### Example 3. Subcutaneous (SQ) Administration of RAGE RNAi Agent to Achieve Serum sRAGE Inhibition in Rats

[0361] Cohorts of either ten (n=10) or fifteen (n=15) male rats were randomly assigned to five (5) treatment groups. The animals were dosed according to as summarized in the following Table 14. All animals were weighed prior to dosing. Animals were dosed according to body weight, via subcutaneous injection of either isotonic saline or RAGE RNAi agent Tri-SM6.1-αvβ6-AD07475 (AC000292). The RAGE RNAi agent was conjugated to a tridentate small molecule αvβ6 epithelial cell targeting ligand (Tri-SM6.1, see FIG. 1) at the 5′ terminal end of the sense strand, formulated in isotonic saline. The chemically modified sequences for RAGE RNAi agents are shown in Table 7B (showing duplex), Table 3 (showing respective antisense strand), and Table 5 (showing respective sense strand with linker but without tridentate small molecule αvβ6 epithelial cell targeting ligand (Tri-SM6.1).

[0362] After dosing, serum was collected from the animals. Serum was collected weekly from the last five (5) animals of each group (˜600 μl for non-terminal collection, ˜1.2 ml for terminal collection). For Groups 1, 2, 3, 7, 8, 9, and 10, the first five (5) animals of each group were harvested at Day 50, or Week 8. For Groups 4-14, the first five (5) animals of each group were harvested at Day 106, or Week 16. Remaining animals were used for sRAGE tracking on nadir and recovery. Soluble RAGE (sRAGE) was measured in the serum samples by ELISA.

TABLE 14
RAGE RNAi Agent and Dosing for Example 3.

| | AC | Animals | |
|---|---|---|---|
| | Duplex | per | Dosing |
| Group ID | Number | Group | Schedule |
| Group 1 (isotonic saline) | N/A | 10 | Bi-weekly |
| Group 2 (15 mg/kg Tri-SM6.1-αvβ6- | AC000292 | 10 | Single, |
| AD07475) | | | Day 1 |
| Group 3 (10 mg/kg Tri-SM6.1-αvβ6- | AC000292 | 10 | Single, |
| AD07475) | | | Day 1 |
| Group 4 (15 mg/kg Tri-SM6.1-αvβ6- | AC000292 | 10 | Every 4 |
| AD07475) | | | Weeks |
| Group 5 (10 mg/kg Tri-SM6.1-αvβ6- | AC000292 | 10 | Every 4 |
| AD07475) | | | Weeks |
| Group 6 (5 mg/kg Tri-SM6.1-αvβ6- | AC000292 | 10 | Every 4 |
| AD07475) | | | Weeks |
| Group 7 (15 mg/kg Tri-SM6.1-αvβ6- | AC000292 | 15 | Every 2 |
| AD07475) | | | Weeks |
| Group 8 (10 mg/kg Tri-SM6.1-αvβ6- | AC000292 | 15 | Every 2 |
| AD07475) | | | Weeks |
| Group 9 (5 mg/kg Tri-SM6.1-αvβ6- | AC000292 | 15 | Every 2 |
| AD07475) | | | Weeks |
| Group 10 (2.5 mg/kg Tri-SM6.1-αvβ6- | AC000292 | 15 | Every 2 |
| AD07475) | | | Weeks |
| Group 11 (15 mg/kg Tri-SM6.1-αvβ6- | AC000292 | 15 | Weekly |
| AD07475) | | | |
| Group 12 (10 mg/kg Tri-SM6.1-αvβ6- | AC000292 | 15 | Weekly |
| AD07475) | | | |
| Group 13 (5 mg/kg Tri-SM6.1-αvβ6- | AC000292 | 15 | Weekly |
| AD07475) | | | |
| Group 14 (2.5 mg/kg Tri-SM6.1-αvβ6- | AC000292 | 15 | Weekly |
| AD07475) | | | |

[0363] As shown in FIG. 11, a single dose of RAGE RNAi agent Tri-SM6.1-αvβ6-AD07475 (AC000292) at 15 mg/kg or 10 mg/kg reduces serum sRAGE levels by ˜5% This is followed by recovery of sRAGE after Day 46.

[0364] As shown in FIG. 12, upon additional re-dosing with RAGE RNAi agent Tri-SM6.1-αvβ6-AD07475 (AC000292) every 4 weeks, there were additional decreases in serum sRAGE. This is apparent at ˜Days 28, 56, 84, and 112.

[0365] As shown in FIG. 13, bi-weekly dosing (dose once every 2 weeks) with RAGE RNAi agent Tri-SM6.1-αvβ6-AD07475 (AC000292) at 15 mg/kg and 10 mg/kg showed near complete depletion of serum sRAGE. At 5 mg/kg and 2.5 mg/kg, the RAGE RNAi agent achieved partial depletion at roughly 50% sRAGE reduction.

[0366] As shown in FIG. 15, 5 weekly doses of RAGE RNAi agent Tri-SM6.1-αvβ6-AD07475 (AC000292) at 15 mg/kg and 10 mg/kg showed near complete depletion of serum sRAGE. Weekly dosing of RAGE RNAi agent Tri-SM6.1-αvβ6-AD07475 (AC000292) at 5 mg/kg and 2.5 mg/kg showed significant sRAGE knockdown, at ˜70% and ˜60%, respectively.

[0367] As shown in FIGS. 11 through 16, subcutaneous (SQ) injection delivery of RAGE RNAi agent showed successful and effective targeted reduction of sRAGE. Repeat doses as low as 10 mg/kg achieved near total depletion of sRAGE, while significant knockdown can be achieved with repeated dosing at 5 mg/kg and 2.5 mg/kg.

### Example 4. Single and Repeated Subcutaneous (SQ) Administration of RAGE RNAi Agent to Inhibit RAGE mRNA Levels in Rats

[0368] Five (5) male rats were randomly assigned to seven (7) treatment groups. The animals were dosed according to as summarized in the following Table 15. All animals were weighed prior to dosing. Animals were dosed according to body weight, via subcutaneous (SQ) injection, of either isotonic saline or RAGE RNAi agent Tri-SM6.1-αvβ6-AD07475 (AC000292). The animals were given either a single or multiple administration of the RAGE RNAi agent. The RAGE RNAi agent was conjugated to a tridentate small molecule αvβ6 epithelial cell targeting ligand (Tri-SM6.1, see FIG. 1) at the 5′ terminal end of the sense strand, formulated in isotonic saline. The chemically modified sequences for RAGE RNAi agents are shown in Table 7B (showing duplex), Table 3 (showing respective antisense strand), and Table 5 (showing respective sense strand with linker but without tridentate small molecule αvβ6 epithelial cell targeting ligand (Tri-SM6.1).

TABLE 15
RAGE RNAi Agent and Dosing for Example 4.

| | AC | Animals | | |
|---|---|---|---|---|
| | Duplex | per | Delivery | Dose |
| Group ID | Number | Group | Route | Schedule |
| Group 1 (isotonic saline) | N/A | 5 | Subcutaneous | Day 1, |
| | | | SQ | 8, 15 |
| Group 2 (30 mpk Tri- | AC000292 | 5 | Subcutaneous | Day 1, |
| SM6.1-αvβ6-AD07475) | | | SQ | 8, 15 |
| Group 3 (20 mpk Tri- | AC000292 | 5 | Subcutaneous | Day 1, |
| SM6.1-αvβ6-AD07475) | | | SQ | 8, 15 |
| Group 4 (15 mpk Tri- | AC000292 | 5 | Subcutaneous | Day 1, |
| SM6.1-αvβ6-AD07475) | | | SQ | 8, 15 |
| Group 5 (30 mpk Tri- | AC000292 | 5 | Subcutaneous | Day 15 |
| SM6.1-αvβ6-AD07475) | | | SQ | |
| Group 6 (20 mpk Tri- | AC000292 | 5 | Subcutaneous | Day 15 |
| SM6.1-αvβ6-AD07475) | | | SQ | |
| Group 7 (15 mpk Tri- | AC000292 | 5 | Subcutaneous | Day 15 |
| SM6.1-αvβ6-AD07475) | | | SQ | |

[0369] At Day 22 post administration of RAGE RNAi agent, all animals were euthanized. The right lung was collected, pulverized, and RNA isolation performed for qPCR analysis of AGER normalized to GAPDH. The rat AGER mRNA levels at Day 22 post RAGE RNAi agent SQ administration is shown in FIG. 9.

[0370] RAGE RNAi agent achieved significant RAGE mRNA reduction in rats. Single subcutaneous administration of RAGE RNAi agent, at 30 mg/kg, achieved nearly ˜85% RAGE mRNA inhibition in rats, compared to nearly 94% RAGE mRNA inhibition with a weekly dose of RAGE RNAi agent.

### Example 5. Repeated Subcutaneous (SQ) Administration of RAGE RNAi Agent to Inhibit Serum Soluble RAGE (sRAGE) Levels in Cynomolgus Monkeys

[0371] RAGE RNAi agents were administered to cynomolgus monkeys (cynos) for assessment. The test animals were non-naïve male cynomolgus monkeys, aged between 5 and 13 years old at time of enrollment, with body weights ranged between 4.63-8.94 kg. All animals had baseline complete blood cell count (CBC) and blood chemistry panel assessed as well as their individual health status.

[0372] Three (n=3) animals per each test group of cynomolgus monkeys received six subcutaneous (SQ) injection of saline, or subcutaneous (SQ) injection of 0.3 mL/kg of RAGE RNAi agent AC001267 (at 2.5 mg/kg, 5 mg/kg, or 10 mg/kg, formulated in saline). RAGE RNAi agent AC001267 is an RNAi molecule that is cross-reactive in cynomolgus monkeys and humans. The RAGE RNAi agent was conjugated to a tridentate small molecule αvβ6 epithelial cell targeting ligand (Tri-SM6.1, see FIG. 1) at the 5′ terminal end of the sense strand, formulated in isotonic saline. The chemically modified sequences for RAGE RNAi agents are shown in Table 7B (showing duplex), Table 3 (showing respective antisense strand), and Table 5 (showing respective sense strand with linker but without tridentate small molecule αvβ6 epithelial cell targeting ligand (Tri-SM6.1). Each animal was dosed in accordance with Table 16 below.

TABLE 16
RAGE RNAi Agent and Dosing for Example 5.

| | Animals | | |
|---|---|---|---|
| | per | Delivery | |
| Group ID | Group | Route | Dose Schedule |
| Group 1 Saline | 3 | Subcutaneous | Day 1, 8, 15, |
| | | SQ | 22, 30, 36 |
| Group 2 5 mg/kg AC001267 | 3 | Subcutaneous | Day 1, 8, 15, |
| | | SQ | 22, 30, 36 |
| Group 3 10 mg/kg AC001267 | 3 | Subcutaneous | Day 1, 8, 15, |
| | | SQ | 22, 30, 36 |
| Group 4 2.5 mg/kg AC001267 | 3 | Subcutaneous | Day 1, 8, 15, |
| | | SQ | 22, 30, 36 |

[0373] On Days 1, 8, 15, 22, 30, and 36, the test animals (for all Groups) were first sedated with intramuscular injection of ketamine hydrochloride (10 mg/kg) and/or Telazol (4-8 mg/kg), serum was then collected (for all Groups), and the test animals were then subsequently administered RAGE RNAi agent (for Groups 2-4) or saline (for Group 1) via subcutaneous (SQ) injections.

[0374] For Groups 1-3, serum was further collected on pre-study, Day 43, 50, 57, 64, 71, 78, 85, 92, 99, 106, 113, and 120. For Group 4, serum was further collected on pre-study, Day 43, 50, 57, 64, 71, 78, 85, and 92. Before each serum collection, test animals were first sedated with intramuscular injection of ketamine hydrochloride (10 mg/kg) and/or Telazol (4-8 mg/kg). Three milliliters of blood were collected from each test animal, serum separated, and serum was used for assessment of soluble RAGE (sRAGE).

[0375] The quantification of serum soluble RAGE (sRAGE) was performed via immunoassay (Gyros Lab) assay developed from using anti-human polyclonal antibody. Each run employed a Gyrolab Bioaffy 4000 CD with 1 nL/s analyte (slow) spin for maximal assay sensitivity. Three-step sandwich assays were conducted using biotinylated goat anti-human polyclonal antibody capture, Alexa Fluor® 647-labeled goat anti-human polyclonal antibody detection, and recombinant human sRAGE protein standard for standard curves. Briefly, antibodies were centrifuged at 12,000 rcf for 5 min prior to use; final concentrations were 150 μg/mL capture antibody in Rexxip H and 25 nM detection antibody in Rexxip F. A working concentration of 1600 μg/mL sRAGE protein standard was prepared in Rexxip H from 250 μg/mL stock aliquots followed by 2-fold serial dilution for resultant final standard concentrations ranging from 400 to 6.25 pg/mL (+ blank). Test animal Cynomolgus monkey serum samples were diluted 2-fold using Rexxip H-Max, designed specifically for 2-fold sample dilution. In general, all samples, standards, and antibody preparations were triturated 12-15× half the working volume to ensure proper mixing.

[0376] Prior each run, the Gyrolab xPlore was customarily primed with system fluid (PBS+0.01% Tween 20, PBST), Wash 1 solution (PBST), and Wash 2 solution (pHI1 Wash Buffer). Additionally, a 2-solution tip wash was employed to further ensure fidelity of washing. In-between runs, due to low sample dilutions (<5- to 10-fold), the instrument was placed in stand-by wherein all lines were re-primed to 20% ethanol. As needed (usually due to visible deposits on the wash station), the wash station was washed with distilled water and both wash buffer solutions (PBST and pH 11 Wash Buffer).

[0377] Data were analyzed using Gyrolab Evaluator. Protein standard dilution curves were fit to a five-parameter logistic curve and goodness of fit determined. In general, % CVs (coefficient of variation) for calculated concentrations more than 25% required additional review—i.e., column binding profiles with spikes and other uncharacteristic patterns or obvious outliers. Outliers were determined using a Dotmatics GraphPad outlier calculator (Outlier calculator (graphpad.com)) at a chosen significance level of alpha=0.05. Sample data were similarly inspected; for the standard curve, % CVs remain at or below 25% until 6.25 pg/mL (45.7%). The LOD was thereby set at 25 μg/mL (12.5 pg/mL×2-fold dilution). Serum soluble RAGE (sRAGE) concentration levels for each collection time point are shown in Table 17, below.

TABLE 17
Serum soluble RAGE (sRAGE) concentration quantified by immunoassay, of Example 5.

| | | Serum sRAGE (pg/mL), at Study Days | | | | | | | | |
|---|---|---|---|---|---|---|---|---|---|---|
| | Animal | Pre- | | | | | | | | |
| Group | ID | dose | Day 1 | Day 8 | Day 15 | Day 22 | Day 30 | Day 36 | Day 43 | Day 50 |
| Group 1 | 1001 | 162.2 | 243.2 | 158.7 | 188.6 | 259.9 | 236.1 | 92.1 | 224.8 | 221.2 |
| Saline | 1002* | 80.5 | 78.1 | 57.8 | 57.4 | 56.9 | 77.2 | 46.2 | 18.9 | 63.3 |
| | 1003 | 195.5 | 496.9 | 241.0 | 349.9 | 390.4 | 406.2 | 141.8 | 278.5 | 313.8 |
| Group 2 | 2001* | 47.4 | 40.1 | 46.7 | 38.2 | 31.5 | 39.4 | 18.3 | 28.7 | 10.1 |
| SQ 5 mg/kg | 2002 | 297.4 | 286.2 | 158.8 | 169.9 | 153.0 | 150.7 | 85.5 | 166.7 | 133.2 |
| AC001267 | 2003 | 253.3 | 287.1 | 133.5 | 160.4 | 196.3 | 171.5 | 74.9 | 99.1 | 163.9 |
| Group 3 | 3001 | 94.6 | 811.5 | 110.3 | 93.8 | 86.6 | 70.9 | 40.8 | 41.6 | 20.6 |
| SQ 10 mg/kg | 3002 | 250.2 | 237.5 | 174.5 | 183.1 | 141.0 | 132.3 | 88.5 | 104.2 | 40.4 |
| AC001267 | 3003 | 67.8 | 149.3 | 112.9 | 103.9 | 89.1 | 67.7 | 77.3 | 65.5 | 67.0 |
| Group 4 | 4001 | 102.9 | 161.9 | 140.3 | 132.8 | 154.5 | 120.5 | 121.8 | 111.0 | 102.5 |
| SQ 2.5 mg/kg | 4002 | 141.7 | 236.4 | 195.0 | 155.3 | 139.3 | 169.7 | 181.6 | 139.2 | 169.7 |
| AC001267 | 4003 | 101.6 | 139.3 | 96.1 | 110.7 | 85.0 | 104.2 | 84.1 | 78.8 | 92.7 |
| | Animal | Serum sRAGE (pg/mL), at Study Days | | | | | | | | |
| Group | ID | Day 57 | Day 64 | Day 71 | Day 78 | Day 85 | Day 92 | Day 99 | Day 106 | Day 113 |
| Group 1 | 1001 | 141.7 | 144.1 | 108.9 | 212.4 | 151.3 | 225.7 | 259.3 | 190.6 | 162.2 |
| Saline | 1002* | 67.6 | 55.9 | 37.3 | 64.2 | 59.1 | 38.1 | 96.4 | 91.0 | 74.6 |
| | 1003 | 322.6 | 254.4 | 191.8 | 310.5 | 249.4 | 260.2 | 318.9 | 239.5 | 225.5 |
| Group 2 | 2001* | 22.7 | 37.2 | 22.1 | 40.0 | 25.8 | 52.1 | 71.5 | 56.8 | 47.7 |
| SQ 5 mg/kg | 2002 | 144.8 | 181.2 | 102.1 | 183.6 | 170.9 | 260.6 | 259.3 | 231.1 | 237.0 |
| AC001267 | 2003 | 161.8 | 158.9 | 124.6 | 244.6 | 168.2 | 250.2 | 293.9 | 222.8 | 268.9 |
| Group 3 | 3001 | 45.3 | 60.8 | 42.1 | 55.6 | 56.7 | 80.1 | 69.0 | 75.9 | 78.2 |
| SQ 10 mg/kg | 3002 | 75.4 | 126.4 | 74.6 | 119.0 | 102.3 | 237.0 | 193.4 | 174.8 | 140.2 |
| AC001267 | 3003 | 44.9 | 48.9 | 41.2 | 80.3 | 62.6 | 115.2 | 81.6 | 93.9 | 101.3 |
| Group 4 | 4001 | 127.6 | 171.8 | 69.2 | 146.0 | 88.3 | N/A | N/A | N/A | N/A |
| SQ 2.5 mg/kg | 4002 | 157.0 | 196.5 | 100.1 | 178.3 | 158.4 | N/A | N/A | N/A | N/A |
| AC001267 | 4003 | 95.6 | 99.0 | 50.6 | 103.9 | 79.6 | N/A | N/A | N/A | N/A |

[0378] Test animals with Animal IDs marked with an asterisk (*) included non-study material-related measurements of sRAGE levels near or below the low limit of quantitation of the assay (LLOQ) of 50 μg/mL.

[0379] Group 3 test animals administered SQ with 10 mg/kg AC001267 showed reduction in sRAGE in all three test animals. sRAGE inhibition occurred immediately after single dose (Day 8 and Day 22) and continued for up to two weeks post last dose to reach lowest level. The duration of sRAGE inhibition was approximately 7 weeks (Study Day 85) after the final SQ injection (at Day 36) until sRAGE levels started to recover to baseline levels (for all 3 test animals: Animal ID 3001, 3002, and 3003).

[0380] Dose dependent inhibition of serum sRAGE was observed, with maximum effect in this study observed when animals were dosed at 10 mg/kg (Group 3). Duration of up to 7 weeks of serum sRAGE reduction was observed at this dose level.

### Other Embodiments

[0381] It is to be understood that while the invention has been described in conjunction with the detailed description thereof, the foregoing description is intended to illustrate and not limit the scope of the invention, which is defined by the scope of the appended claims. Other aspects, advantages, and modifications are within the scope of the following claims.

1. A method for inhibiting expression of a Receptor for Advanced Glycation End-products gene in a subject, the method comprising administering to the subject by subcutaneous injection an RNAi agent comprising:
an antisense strand comprising at least 17 contiguous nucleotides differing by 0 or 1 nucleotides from any one of the antisense strand sequences provided in Table 2, Table 3, or Table 10; and
a sense strand comprising a nucleotide sequence that is at least partially complementary to the antisense strand.

2. The method of claim 1, comprising an antisense strand that consists of, consists essentially of, or comprises a nucleotide sequence that differs by 0 or 1 nucleotides from one of the following nucleotide sequences (5′→3′):
(SEQ ID NO: 35)
UUGUGUUCAGUUUCCAUUC;
(SEQ ID NO: 45)
UGAUGUUUUGAGCACCUAC;
(SEQ ID NO: 49)
UUCCAUUCCUGUUCAUUGC;
(SEQ ID NO: 780)
UUGUGUUCAGUUUCCAUUCCG;
(SEQ ID NO: 796)
UGAUGUUUUGAGCACCUACUC;
or
(SEQ ID NO: 797)
UUCCAUUCCUGUUCAUUGCCU;.

3. The method of claim 2, wherein the sense strand consists of, consists essentially of, or comprises a nucleotide sequence that differs by 0 or 1 nucleotides from one of the following nucleotide sequences 5′→3′):
(SEQ ID NO: 278)
GAAUGGAAACUGAACACAA;
(SEQ ID NO: 288)
GUAGGUGCUCAAAACAUCA;
(SEQ ID NO: 296)
GCAAUGAACAGGAAUIGAA;
(SEQ ID NO: 818)
CGGAAUGGAAACUGAACACAA;
(SEQ ID NO: 838)
GAGUAGGUGCUCAAAACAUCA;
or
(SEQ ID NO: 839)
AGGCAAUGAACAGGAAUIGAA.

4. The method of claim 3, wherein all or substantially all of the nucleotides are modified nucleotides.

5. The method of claim 1, comprising an antisense strand that comprises, consists of, or consists essentially of a modified nucleotide sequence that differs by 0 or 1 nucleotides from one of the following nucleotide sequences (5′→3′):
(SEQ ID NO: 521)
usUfsgsUfgUfuCfaGfuUfuCfcAfuUfcCfsg;
(SEQ ID NO: 522)
cPrpusUfsgsUfgUfuCfaGfuUfuCfcAfuUfcCfsg;
(SEQ ID NO: 580)
usGfsasuguuuugaGfcAfcCfuacusc;
(SEQ ID NO: 581)
cPrpusGfsasuguuuugaGfcAfcCfuacusc;
(SEQ ID NO: 547)
usUfscsCfaUfuCfcUfgUfuCfaUfuGfcCfsu;
wherein a represents 2′-O-methyl adenosine, c represents 2′-O-methyl cytidine, g represents 2′-O-methyl guanosine, and u represents 2′-O-methyl uridine; Af represents 2′-fluoro adenosine, Cf represents 2′-fluoro cytidine, Gf represents 2′-fluoro guanosine, and Uf represents 2′-fluoro uridine; cPrpu represents a 5′-cyclopropyl phosphonate-2′-O-methyl uridine; s represents a phosphorothioate linkage; and wherein all or substantially all of the nucleotides on the sense strand are modified nucleotides.

6. The method of claim 1, wherein the sense strand comprises, consists of, or consists essentially of a modified nucleotide sequence that differs by 0 or 1 nucleotides from one of the following nucleotide sequences (5′→3′):
(SEQ ID NO: 671)
gsaguagGfuGfcUfcaaaacauca;
(SEQ ID NO: 627)
asggcaaugAfAfCfaggaauigaa;
(SEQ ID NO: 602)
csggaauggAfAfAfcugaacacaa;
wherein a represents 2′-O-methyl adenosine, c represents 2′-O-methyl cytidine, g represents 2′-O-methyl guanosine, i represents 2′-O-methyl inosine, and u represents 2′-O-methyl uridine; Af represents 2′-fluoro adenosine, Cf represents 2′-fluoro cytidine, Gf represents 2′-fluoro guanosine, and Uf represents 2′-fluoro uridine; and s represents a phosphorothioate linkage; and wherein all or substantially all of the nucleotides on the antisense strand are modified nucleotides.

7. The method of claim 6, wherein the sense strand further includes inverted abasic residues at the 3′ terminal end of the nucleotide sequence, at the 5′ end of the nucleotide sequence, or at both.

8. The method of claim 1, wherein the RNAi agent is linked to a targeting ligand.

9. The method of claim 8, wherein the targeting ligand comprises the structure: [chemical structure]
or a pharmaceutically acceptable salt thereof, or [chemical structure]
or a pharmaceutically acceptable salt thereof,
wherein [symbol] indicates the point of connection to the RNAi agent.

10. The method of claim 9, wherein RNAi agent is conjugated to a targeting ligand having the following structure:

[chemical structure]

11. The method of claim 10, wherein the targeting ligand is conjugated to the 5′ terminal end of the sense strand.

12. The method of claim 1, wherein the RNAi agent is a pharmaceutically acceptable salt.

13. The method of claim 12, wherein the RNAi agent is a sodium salt.

14. The method of claim 1, where in the RNAi agent is formulated into a pharmaceutical composition suitable for subcutaneous administration, wherein the pharmaceutical composition comprises the RNAi agent and at least one pharmaceutically acceptable excipient.

15. A method of treating one or more diseases, disorders, or symptoms associated with enhanced or elevated membrane RAGE activity levels or that can otherwise be mediated by a reduction in AGER gene expression levels, the method comprising subcutaneously administering to a human subject in need thereof a therapeutically effective amount of an RNAi agent comprising:
a) an antisense strand comprising at least 17 contiguous nucleotides differing by 0 or 1 nucleotides from any one of the sequences provided in Table 2, Table 3, or Table 10; and
b) a sense strand comprising a nucleotide sequence that is at least partially complementary to the antisense strand.

16. The method of claim 15, wherein the disease is a respiratory disease.

17. The method of claim 16, wherein the respiratory disease is cystic fibrosis, chronic bronchitis, non-cystic fibrosis bronchiectasis, chronic obstructive pulmonary disease (COPD), asthma, respiratory tract infections, primary ciliary dyskinesia, or lung carcinoma cystic fibrosis.

18. The method of claim 15, wherein the RNAi agent is administered in two or more doses.

19. The method of claim 18, wherein the two or more doses are administered about weekly.

20. The method of claim 18, wherein the two or more doses are administered about once every two weeks.

21. The method of claim 18, wherein the two or more doses are administered about every four weeks.

22. The method of claim 1, wherein the RNAi agent is administered at a dose of about 0.01 mg/kg to about 40.0 mg/kg of body weight of the subject.

23. The method of claim 22, wherein the RNAi agent is administered at a dose of about 5.0 mg/kg to about 18.0 mg/kg of body weight of the subject.

24. The method of claim 23, wherein the RNAi agent is administered at a dose of about 10.0 mg/kg to about 16.0 mg/kg of body weight of the subject.

25. The method of claim 24, wherein the RNAi agent is administered at a dose of about 12.0 mg/kg to about 15.0 mg/kg of body weight of the subject.

The application's sequence listing, which the Patent Office published only in electronic form, follows.

SEQUENCE LISTING (867 sequences)

SEQ ID NO: 1 - RNA, 1420 nt, Homo sapiens
  source 1..1420: mol_type = mRNA
agacagagccaggaccctggaaggaagcaggatggctgccggaacagcagttggagcctgggtgctggtcctcagtctgtggggggcagtagtaggtgctcaaaacatcacagcccggattggcgagccactggtgctgaagtgtaagggggcccccaagaaaccaccccagcggctggaatggaaactgaacacaggccggacagaagcttggaaggtcctgtctccccagggaggaggcccctgggacagtgtggctcgtgtccttcccaacggctccctcttccttccggctgtcgggatccaggatgaggggattttccggtgccaggcaatgaacaggaatggaaaggagaccaagtccaactaccgagtccgtgtctaccagattcctgggaagccagaaattgtagattctgcctctgaactcacggctggtgttcccaataaggtggggacatgtgtgtcagagggaagctaccctgcagggactcttagctggcacttggatgggaagcccctggtgcctaatgagaagggagtatctgtgaaggaacagaccaggagacaccctgagacagggctcttcacactgcagtcggagctaatggtgaccccagcccggggaggagatccccgtcccaccttctcctgtagcttcagcccaggccttccccgacaccgggccttgcgcacagcccccatccagccccgtgtctgggagcctgtgcctctggaggaggtccaattggtggtggagccagaaggtggagcagtagctcctggtggaaccgtaaccctgacctgtgaagtccctgcccagccctctcctcaaatccactggatgaaggatggtgtgcccttgccccttccccccagccctgtgctgatcctccctgagatagggcctcaggaccagggaacctacagctgtgtggccacccattccagccacgggccccaggaaagccgtgctgtcagcatcagcatcatcgaaccaggcgaggaggggccaactgcaggctctgtgggaggatcagggctgggaactctagccctggccctggggatcctgggaggcctggggacagccgccctgctcattggggtcatcttgtggcaaaggcggcaacgccgaggagaggagaggaaggccccagaaaaccaggaggaagaggaggagcgtgcagaactgaatcagtcggaggaacctgaggcaggcgagagtagtactggagggccttgaggggcccacagacagatcccatccatcagctcccttttctttttcccttgaactgttctggcctcagaccaactctctcctgtataatctctctcctgtataaccccaccttgccaagctttcttctacaaccagagccccccacaatgatgattaaacacctgacacatcttg

SEQ ID NO: 2 - RNA, 19 nt, synthetic construct
  source 1..19: mol_type = other RNA
gaatggaaactgaacacag

SEQ ID NO: 3 - RNA, 19 nt, synthetic construct
  source 1..19: mol_type = other RNA
gtaggtgctcaaaacatca

SEQ ID NO: 4 - RNA, 19 nt, synthetic construct
  source 1..19: mol_type = other RNA
gcaatgaacaggaatggaa

SEQ ID NO: 5 - RNA, 19 nt, synthetic construct
  source 1..19: mol_type = other RNA
aatggaaactgaacacagg

SEQ ID NO: 6 - RNA, 19 nt, synthetic construct
  source 1..19: mol_type = other RNA
cagattcctgggaagccag

SEQ ID NO: 7 - RNA, 19 nt, synthetic construct
  source 1..19: mol_type = other RNA
ctgggaagccagaaattgt

SEQ ID NO: 8 - RNA, 19 nt, synthetic construct
  source 1..19: mol_type = other RNA
cactggtgctgaagtgtaa

SEQ ID NO: 9 - RNA, 19 nt, synthetic construct
  source 1..19: mol_type = other RNA
gacagaagcttggaaggtc

SEQ ID NO: 10 - RNA, 19 nt, synthetic construct
  source 1..19: mol_type = other RNA
ggatgaggggattttccgg

SEQ ID NO: 11 - RNA, 19 nt, synthetic construct
  source 1..19: mol_type = other RNA
attcctgggaagccagaaa

SEQ ID NO: 12 - RNA, 19 nt, synthetic construct
  source 1..19: mol_type = other RNA
attctgcctctgaactcac

SEQ ID NO: 13 - RNA, 19 nt, synthetic construct
  source 1..19: mol_type = other RNA
ccctgcagggactcttagc

SEQ ID NO: 14 - RNA, 19 nt, synthetic construct
  source 1..19: mol_type = other RNA
cctgcagggactcttagct

SEQ ID NO: 15 - RNA, 19 nt, synthetic construct
  source 1..19: mol_type = other RNA
ccaccttctcctgtagctt

SEQ ID NO: 16 - RNA, 19 nt, synthetic construct
  source 1..19: mol_type = other RNA
cttctcctgtagcttcagc

SEQ ID NO: 17 - RNA, 19 nt, synthetic construct
  source 1..19: mol_type = other RNA
tgctggtcctcagtctgtg

SEQ ID NO: 18 - RNA, 19 nt, synthetic construct
  source 1..19: mol_type = other RNA
gctggtcctcagtctgtgg

SEQ ID NO: 19 - RNA, 19 nt, synthetic construct
  source 1..19: mol_type = other RNA
tccgtgtctaccagattcc

SEQ ID NO: 20 - RNA, 19 nt, synthetic construct
  source 1..19: mol_type = other RNA
cgtgtctaccagattcctg

SEQ ID NO: 21 - RNA, 19 nt, synthetic construct
  source 1..19: mol_type = other RNA
caccttctcctgtagcttc

SEQ ID NO: 22 - RNA, 19 nt, synthetic construct
  source 1..19: mol_type = other RNA
cctcaaatccactggatga

SEQ ID NO: 23 - RNA, 19 nt, synthetic construct
  source 1..19: mol_type = other RNA
tagattctgcctctgaact

SEQ ID NO: 24 - RNA, 19 nt, synthetic construct
  source 1..19: mol_type = other RNA
gattctgcctctgaactca

SEQ ID NO: 25 - RNA, 19 nt, synthetic construct
  source 1..19: mol_type = other RNA
ctggtgttcccaataaggt

SEQ ID NO: 26 - RNA, 19 nt, synthetic construct
  source 1..19: mol_type = other RNA
ggtgttcccaataaggtgg

SEQ ID NO: 27 - RNA, 19 nt, synthetic construct
  source 1..19: mol_type = other RNA
ttagctggcacttggatgg

SEQ ID NO: 28 - RNA, 19 nt, synthetic construct
  source 1..19: mol_type = other RNA
taatgagaagggagtatct

SEQ ID NO: 29 - RNA, 19 nt, synthetic construct
  source 1..19: mol_type = other RNA
gagaagggagtatctgtga

SEQ ID NO: 30 - RNA, 19 nt, synthetic construct
  source 1..19: mol_type = other RNA
gcatcagcatcatcgaacc

SEQ ID NO: 31 - RNA, 19 nt, synthetic construct
  source 1..19: mol_type = other RNA
tgaacaggaatggaaagga

SEQ ID NO: 32 - RNA, 19 nt, synthetic construct
  source 1..19: mol_type = other RNA
ctaccgagtccgtgtctac

SEQ ID NO: 33 - RNA, 19 nt, synthetic construct
  source 1..19: mol_type = other RNA
tgggaagccagaaattgta

SEQ ID NO: 34 - RNA, 19 nt, synthetic construct
  source 1..19: mol_type = other RNA
cctaatgagaagggagtat

SEQ ID NO: 35 - RNA, 19 nt, synthetic construct
  source 1..19: mol_type = other RNA
ttgtgttcagtttccattc

SEQ ID NO: 36 - RNA, 19 nt, synthetic construct
  source 1..19: mol_type = other RNA
atgtgttcagtttccattc

SEQ ID NO: 37 - RNA, 19 nt, synthetic construct
  source 1..19: mol_type = other RNA
ctgtgttcagtttccattc

SEQ ID NO: 38 - RNA, 19 nt, synthetic construct
  source 1..19: mol_type = other RNA
ntgtgttcagtttccattc

SEQ ID NO: 39 - RNA, 19 nt, synthetic construct
  source 1..19: mol_type = other RNA
ntgtgttcagtttccattn

SEQ ID NO: 40 - RNA, 19 nt, synthetic construct
  source 1..19: mol_type = other RNA
ttgtgttcagtttccattc

SEQ ID NO: 41 - RNA, 19 nt, synthetic construct
  source 1..19: mol_type = other RNA
atgtgttcagtttccattc

SEQ ID NO: 42 - RNA, 19 nt, synthetic construct
  source 1..19: mol_type = other RNA
ctgtgttcagtttccattc

SEQ ID NO: 43 - RNA, 19 nt, synthetic construct
  source 1..19: mol_type = other RNA
ntgtgttcagtttccattc

SEQ ID NO: 44 - RNA, 19 nt, synthetic construct
  source 1..19: mol_type = other RNA
ntgtgttcagtttccattn

SEQ ID NO: 45 - RNA, 19 nt, synthetic construct
  source 1..19: mol_type = other RNA
tgatgttttgagcacctac

SEQ ID NO: 46 - RNA, 19 nt, synthetic construct
  source 1..19: mol_type = other RNA
agatgttttgagcacctac

SEQ ID NO: 47 - RNA, 19 nt, synthetic construct
  source 1..19: mol_type = other RNA
ngatgttttgagcacctac

SEQ ID NO: 48 - RNA, 19 nt, synthetic construct
  source 1..19: mol_type = other RNA
ngatgttttgagcacctan

SEQ ID NO: 49 - RNA, 19 nt, synthetic construct
  source 1..19: mol_type = other RNA
ttccattcctgttcattgc

SEQ ID NO: 50 - RNA, 19 nt, synthetic construct
  source 1..19: mol_type = other RNA
atccattcctgttcattgc

SEQ ID NO: 51 - RNA, 19 nt, synthetic construct
  source 1..19: mol_type = other RNA
ntccattcctgttcattgc

SEQ ID NO: 52 - RNA, 19 nt, synthetic construct
  source 1..19: mol_type = other RNA
ntccattcctgttcattgn

SEQ ID NO: 53 - RNA, 19 nt, synthetic construct
  source 1..19: mol_type = other RNA
ttccattcctgttcattgc

SEQ ID NO: 54 - RNA, 19 nt, synthetic construct
  source 1..19: mol_type = other RNA
atccattcctgttcattgc

SEQ ID NO: 55 - RNA, 19 nt, synthetic construct
  source 1..19: mol_type = other RNA
ntccattcctgttcattgc

SEQ ID NO: 56 - RNA, 19 nt, synthetic construct
  source 1..19: mol_type = other RNA
ntccattcctgttcattgn

SEQ ID NO: 57 - RNA, 19 nt, synthetic construct
  source 1..19: mol_type = other RNA
tctgtgttcagtttccatt

SEQ ID NO: 58 - RNA, 19 nt, synthetic construct
  source 1..19: mol_type = other RNA
actgtgttcagtttccatt

SEQ ID NO: 59 - RNA, 19 nt, synthetic construct
  source 1..19: mol_type = other RNA
cctgtgttcagtttccatt

SEQ ID NO: 60 - RNA, 19 nt, synthetic construct
  source 1..19: mol_type = other RNA
nctgtgttcagtttccatt

SEQ ID NO: 61 - RNA, 19 nt, synthetic construct
  source 1..19: mol_type = other RNA
nctgtgttcagtttccatn

SEQ ID NO: 62 - RNA, 19 nt, synthetic construct
  source 1..19: mol_type = other RNA
tctgtgttcagtttccatt

SEQ ID NO: 63 - RNA, 19 nt, synthetic construct
  source 1..19: mol_type = other RNA
actgtgttcagtttccatt

SEQ ID NO: 64 - RNA, 19 nt, synthetic construct
  source 1..19: mol_type = other RNA
cctgtgttcagtttccatt

SEQ ID NO: 65 - RNA, 19 nt, synthetic construct
  source 1..19: mol_type = other RNA
nctgtgttcagtttccatt

SEQ ID NO: 66 - RNA, 19 nt, synthetic construct
  source 1..19: mol_type = other RNA
nctgtgttcagtttccatn

SEQ ID NO: 67 - RNA, 19 nt, synthetic construct
  source 1..19: mol_type = other RNA
ttggcttcccaggaatctg

SEQ ID NO: 68 - RNA, 19 nt, synthetic construct
  source 1..19: mol_type = other RNA
atggcttcccaggaatctg

SEQ ID NO: 69 - RNA, 19 nt, synthetic construct
  source 1..19: mol_type = other RNA
ctggcttcccaggaatctg

SEQ ID NO: 70 - RNA, 19 nt, synthetic construct
  source 1..19: mol_type = other RNA
ntggcttcccaggaatctg

SEQ ID NO: 71 - RNA, 19 nt, synthetic construct
  source 1..19: mol_type = other RNA
ntggcttcccaggaatctn

SEQ ID NO: 72 - RNA, 19 nt, synthetic construct
  source 1..19: mol_type = other RNA
ttggcttcccaggaatctg

SEQ ID NO: 73 - RNA, 19 nt, synthetic construct
  source 1..19: mol_type = other RNA
atggcttcccaggaatctg

SEQ ID NO: 74 - RNA, 19 nt, synthetic construct
  source 1..19: mol_type = other RNA
ctggcttcccaggaatctg

SEQ ID NO: 75 - RNA, 19 nt, synthetic construct
  source 1..19: mol_type = other RNA
ntggcttcccaggaatctg

SEQ ID NO: 76 - RNA, 19 nt, synthetic construct
  source 1..19: mol_type = other RNA
ntggcttcccaggaatctn

SEQ ID NO: 77 - RNA, 19 nt, synthetic construct
  source 1..19: mol_type = other RNA
acaatttctggcttcccag

SEQ ID NO: 78 - RNA, 19 nt, synthetic construct
  source 1..19: mol_type = other RNA
tcaatttctggcttcccag

SEQ ID NO: 79 - RNA, 19 nt, synthetic construct
  source 1..19: mol_type = other RNA
ncaatttctggcttcccag

SEQ ID NO: 80 - RNA, 19 nt, synthetic construct
  source 1..19: mol_type = other RNA
ncaatttctggcttcccan

SEQ ID NO: 81 - RNA, 19 nt, synthetic construct
  source 1..19: mol_type = other RNA
ttacacttcagcaccagtg

SEQ ID NO: 82 - RNA, 19 nt, synthetic construct
  source 1..19: mol_type = other RNA
atacacttcagcaccagtg

SEQ ID NO: 83 - RNA, 19 nt, synthetic construct
  source 1..19: mol_type = other RNA
ntacacttcagcaccagtg

SEQ ID NO: 84 - RNA, 19 nt, synthetic construct
  source 1..19: mol_type = other RNA
ntacacttcagcaccagtn

SEQ ID NO: 85 - RNA, 19 nt, synthetic construct
  source 1..19: mol_type = other RNA
taccttccaagcttctgtc

SEQ ID NO: 86 - RNA, 19 nt, synthetic construct
  source 1..19: mol_type = other RNA
gaccttccaagcttctgtc

SEQ ID NO: 87 - RNA, 19 nt, synthetic construct
  source 1..19: mol_type = other RNA
aaccttccaagcttctgtc

SEQ ID NO: 88 - RNA, 19 nt, synthetic construct
  source 1..19: mol_type = other RNA
naccttccaagcttctgtc

SEQ ID NO: 89 - RNA, 19 nt, synthetic construct
  source 1..19: mol_type = other RNA
naccttccaagcttctgtn

SEQ ID NO: 90 - RNA, 19 nt, synthetic construct
  source 1..19: mol_type = other RNA
taccttccaagcttctgtc

SEQ ID NO: 91 - RNA, 19 nt, synthetic construct
  source 1..19: mol_type = other RNA
gaccttccaagcttctgtc

SEQ ID NO: 92 - RNA, 19 nt, synthetic construct
  source 1..19: mol_type = other RNA
aaccttccaagcttctgtc

SEQ ID NO: 93 - RNA, 19 nt, synthetic construct
  source 1..19: mol_type = other RNA
naccttccaagcttctgtc

SEQ ID NO: 94 - RNA, 19 nt, synthetic construct
  source 1..19: mol_type = other RNA
naccttccaagcttctgtn

SEQ ID NO: 95 - RNA, 19 nt, synthetic construct
  source 1..19: mol_type = other RNA
tcggaaaatcccctcatcc

SEQ ID NO: 96 - RNA, 19 nt, synthetic construct
  source 1..19: mol_type = other RNA
ccggaaaatcccctcatcc

SEQ ID NO: 97 - RNA, 19 nt, synthetic construct
  source 1..19: mol_type = other RNA
acggaaaatcccctcatcc

SEQ ID NO: 98 - RNA, 19 nt, synthetic construct
  source 1..19: mol_type = other RNA
ncggaaaatcccctcatcc

SEQ ID NO: 99 - RNA, 19 nt, synthetic construct
  source 1..19: mol_type = other RNA
ncggaaaatcccctcatcn

SEQ ID NO: 100 - RNA, 19 nt, synthetic construct
  source 1..19: mol_type = other RNA
tcggaaaatcccctcatcc

SEQ ID NO: 101 - RNA, 19 nt, synthetic construct
  source 1..19: mol_type = other RNA
ccggaaaatcccctcatcc

SEQ ID NO: 102 - RNA, 19 nt, synthetic construct
  source 1..19: mol_type = other RNA
acggaaaatcccctcatcc

SEQ ID NO: 103 - RNA, 19 nt, synthetic construct
  source 1..19: mol_type = other RNA
ncggaaaatcccctcatcc

SEQ ID NO: 104 - RNA, 19 nt, synthetic construct
  source 1..19: mol_type = other RNA
ncggaaaatcccctcatcn

SEQ ID NO: 105 - RNA, 19 nt, synthetic construct
  source 1..19: mol_type = other RNA
tttctggcttcccaggaat

SEQ ID NO: 106 - RNA, 19 nt, synthetic construct
  source 1..19: mol_type = other RNA
attctggcttcccaggaat

SEQ ID NO: 107 - RNA, 19 nt, synthetic construct
  source 1..19: mol_type = other RNA
nttctggcttcccaggaat

SEQ ID NO: 108 - RNA, 19 nt, synthetic construct
  source 1..19: mol_type = other RNA
nttctggcttcccaggaan

SEQ ID NO: 109 - RNA, 19 nt, synthetic construct
  source 1..19: mol_type = other RNA
ttgagttcagaggcagaat

SEQ ID NO: 110 - RNA, 19 nt, synthetic construct
  source 1..19: mol_type = other RNA
gtgagttcagaggcagaat

SEQ ID NO: 111 - RNA, 19 nt, synthetic construct
  source 1..19: mol_type = other RNA
atgagttcagaggcagaat

SEQ ID NO: 112 - RNA, 19 nt, synthetic construct
  source 1..19: mol_type = other RNA
ntgagttcagaggcagaat

SEQ ID NO: 113 - RNA, 19 nt, synthetic construct
  source 1..19: mol_type = other RNA
ntgagttcagaggcagaan

SEQ ID NO: 114 - RNA, 19 nt, synthetic construct
  source 1..19: mol_type = other RNA
tctaagagtccctgcaggg

SEQ ID NO: 115 - RNA, 19 nt, synthetic construct
  source 1..19: mol_type = other RNA
actaagagtccctgcaggg

SEQ ID NO: 116 - RNA, 19 nt, synthetic construct
  source 1..19: mol_type = other RNA
gctaagagtccctgcaggg

SEQ ID NO: 117 - RNA, 19 nt, synthetic construct
  source 1..19: mol_type = other RNA
nctaagagtccctgcaggg

SEQ ID NO: 118 - RNA, 19 nt, synthetic construct
  source 1..19: mol_type = other RNA
nctaagagtccctgcaggn

SEQ ID NO: 119 - RNA, 19 nt, synthetic construct
  source 1..19: mol_type = other RNA
agctaagagtccctgcagg

SEQ ID NO: 120 - RNA, 19 nt, synthetic construct
  source 1..19: mol_type = other RNA
tgctaagagtccctgcagg

SEQ ID NO: 121 - RNA, 19 nt, synthetic construct
  source 1..19: mol_type = other RNA
ngctaagagtccctgcagg

SEQ ID NO: 122 - RNA, 19 nt, synthetic construct
  source 1..19: mol_type = other RNA
ngctaagagtccctgcagn

SEQ ID NO: 123 - RNA, 19 nt, synthetic construct
  source 1..19: mol_type = other RNA
agctaagagtccctgcagg

SEQ ID NO: 124 - RNA, 19 nt, synthetic construct
  source 1..19: mol_type = other RNA
tgctaagagtccctgcagg

SEQ ID NO: 125 - RNA, 19 nt, synthetic construct
  source 1..19: mol_type = other RNA
ngctaagagtccctgcagg

SEQ ID NO: 126 - RNA, 19 nt, synthetic construct
  source 1..19: mol_type = other RNA
ngctaagagtccctgcagn

SEQ ID NO: 127 - RNA, 19 nt, synthetic construct
  source 1..19: mol_type = other RNA
aagctacaggagaaggtgg

SEQ ID NO: 128 - RNA, 19 nt, synthetic construct
  source 1..19: mol_type = other RNA
tagctacaggagaaggtgg

SEQ ID NO: 129 - RNA, 19 nt, synthetic construct
  source 1..19: mol_type = other RNA
nagctacaggagaaggtgg

SEQ ID NO: 130 - RNA, 19 nt, synthetic construct
  source 1..19: mol_type = other RNA
nagctacaggagaaggtgn

SEQ ID NO: 131 - RNA, 19 nt, synthetic construct
  source 1..19: mol_type = other RNA
aagctacaggagaaggtgg

SEQ ID NO: 132 - RNA, 19 nt, synthetic construct
  source 1..19: mol_type = other RNA
tagctacaggagaaggtgg

SEQ ID NO: 133 - RNA, 19 nt, synthetic construct
  source 1..19: mol_type = other RNA
nagctacaggagaaggtgg

SEQ ID NO: 134 - RNA, 19 nt, synthetic construct
  source 1..19: mol_type = other RNA
nagctacaggagaaggtgn

SEQ ID NO: 135 - RNA, 19 nt, synthetic construct
  source 1..19: mol_type = other RNA
tctgaagctacaggagaag

SEQ ID NO: 136 - RNA, 19 nt, synthetic construct
  source 1..19: mol_type = other RNA
actgaagctacaggagaag

SEQ ID NO: 137 - RNA, 19 nt, synthetic construct
  source 1..19: mol_type = other RNA
gctgaagctacaggagaag

SEQ ID NO: 138 - RNA, 19 nt, synthetic construct
  source 1..19: mol_type = other RNA
nctgaagctacaggagaag

SEQ ID NO: 139 - RNA, 19 nt, synthetic construct
  source 1..19: mol_type = other RNA
nctgaagctacaggagaan

SEQ ID NO: 140 - RNA, 19 nt, synthetic construct
  source 1..19: mol_type = other RNA
tctgaagctacaggagaag

SEQ ID NO: 141 - RNA, 19 nt, synthetic construct
  source 1..19: mol_type = other RNA
actgaagctacaggagaag

SEQ ID NO: 142 - RNA, 19 nt, synthetic construct
  source 1..19: mol_type = other RNA
gctgaagctacaggagaag

SEQ ID NO: 143 - RNA, 19 nt, synthetic construct
  source 1..19: mol_type = other RNA
nctgaagctacaggagaag

SEQ ID NO: 144 - RNA, 19 nt, synthetic construct
  source 1..19: mol_type = other RNA
nctgaagctacaggagaan

SEQ ID NO: 145 - RNA, 19 nt, synthetic construct
  source 1..19: mol_type = other RNA
tacagactgaggaccagca

SEQ ID NO: 146 - RNA, 19 nt, synthetic construct
  source 1..19: mol_type = other RNA
aacagactgaggaccagca

SEQ ID NO: 147 - RNA, 19 nt, synthetic construct
  source 1..19: mol_type = other RNA
cacagactgaggaccagca

SEQ ID NO: 148 - RNA, 19 nt, synthetic construct
  source 1..19: mol_type = other RNA
nacagactgaggaccagca

SEQ ID NO: 149 - RNA, 19 nt, synthetic construct
  source 1..19: mol_type = other RNA
nacagactgaggaccagcn

SEQ ID NO: 150 - RNA, 19 nt, synthetic construct
  source 1..19: mol_type = other RNA
tacagactgaggaccagca

SEQ ID NO: 151 - RNA, 19 nt, synthetic construct
  source 1..19: mol_type = other RNA
aacagactgaggaccagca

SEQ ID NO: 152 - RNA, 19 nt, synthetic construct
  source 1..19: mol_type = other RNA
cacagactgaggaccagca

SEQ ID NO: 153 - RNA, 19 nt, synthetic construct
  source 1..19: mol_type = other RNA
nacagactgaggaccagca

SEQ ID NO: 154 - RNA, 19 nt, synthetic construct
  source 1..19: mol_type = other RNA
nacagactgaggaccagcn

SEQ ID NO: 155 - RNA, 19 nt, synthetic construct
  source 1..19: mol_type = other RNA
tcacagactgaggaccagc

SEQ ID NO: 156 - RNA, 19 nt, synthetic construct
  source 1..19: mol_type = other RNA
acacagactgaggaccagc

SEQ ID NO: 157 - RNA, 19 nt, synthetic construct
  source 1..19: mol_type = other RNA
ncacagactgaggaccagc

SEQ ID NO: 158 - RNA, 19 nt, synthetic construct
  source 1..19: mol_type = other RNA
ncacagactgaggaccagn

SEQ ID NO: 159 - RNA, 19 nt, synthetic construct
  source 1..19: mol_type = other RNA
tcacagactgaggaccagc

SEQ ID NO: 160 - RNA, 19 nt, synthetic construct
  source 1..19: mol_type = other RNA
acacagactgaggaccagc

SEQ ID NO: 161 - RNA, 19 nt, synthetic construct
  source 1..19: mol_type = other RNA
ncacagactgaggaccagc

SEQ ID NO: 162 - RNA, 19 nt, synthetic construct
  source 1..19: mol_type = other RNA
ncacagactgaggaccagn

SEQ ID NO: 163 - RNA, 19 nt, synthetic construct
  source 1..19: mol_type = other RNA
tcacagactgaggaccagc

SEQ ID NO: 164 - RNA, 19 nt, synthetic construct
  source 1..19: mol_type = other RNA
acacagactgaggaccagc

SEQ ID NO: 165 - RNA, 19 nt, synthetic construct
  source 1..19: mol_type = other RNA
ncacagactgaggaccagc

SEQ ID NO: 166 - RNA, 19 nt, synthetic construct
  source 1..19: mol_type = other RNA
ncacagactgaggaccagn

SEQ ID NO: 167 - RNA, 19 nt, synthetic construct
  source 1..19: mol_type = other RNA
tgaatctggtagacacgga

SEQ ID NO: 168 - RNA, 19 nt, synthetic construct
  source 1..19: mol_type = other RNA
agaatctggtagacacgga

SEQ ID NO: 169 - RNA, 19 nt, synthetic construct
  source 1..19: mol_type = other RNA
ggaatctggtagacacgga

SEQ ID NO: 170 - RNA, 19 nt, synthetic construct
  source 1..19: mol_type = other RNA
ngaatctggtagacacgga

SEQ ID NO: 171 - RNA, 19 nt, synthetic construct
  source 1..19: mol_type = other RNA
ngaatctggtagacacggn

SEQ ID NO: 172 - RNA, 19 nt, synthetic construct
  source 1..19: mol_type = other RNA
tgaatctggtagacacgga

SEQ ID NO: 173 - RNA, 19 nt, synthetic construct
  source 1..19: mol_type = other RNA
agaatctggtagacacgga

SEQ ID NO: 174 - RNA, 19 nt, synthetic construct
  source 1..19: mol_type = other RNA
ggaatctggtagacacgga

SEQ ID NO: 175 - RNA, 19 nt, synthetic construct
  source 1..19: mol_type = other RNA
ngaatctggtagacacgga

SEQ ID NO: 176 - RNA, 19 nt, synthetic construct
  source 1..19: mol_type = other RNA
ngaatctggtagacacggn

SEQ ID NO: 177 - RNA, 19 nt, synthetic construct
  source 1..19: mol_type = other RNA
taggaatctggtagacacg

SEQ ID NO: 178 - RNA, 19 nt, synthetic construct
  source 1..19: mol_type = other RNA
aaggaatctggtagacacg

SEQ ID NO: 179 - RNA, 19 nt, synthetic construct
  source 1..19: mol_type = other RNA
caggaatctggtagacacg

SEQ ID NO: 180 - RNA, 19 nt, synthetic construct
  source 1..19: mol_type = other RNA
naggaatctggtagacacg

SEQ ID NO: 181 - RNA, 19 nt, synthetic construct
  source 1..19: mol_type = other RNA
naggaatctggtagacacn

SEQ ID NO: 182 - RNA, 19 nt, synthetic construct
  source 1..19: mol_type = other RNA
taagctacaggagaaggtg

SEQ ID NO: 183 - RNA, 19 nt, synthetic construct
  source 1..19: mol_type = other RNA
aaagctacaggagaaggtg

SEQ ID NO: 184 - RNA, 19 nt, synthetic construct
  source 1..19: mol_type = other RNA
gaagctacaggagaaggtg

SEQ ID NO: 185 - RNA, 19 nt, synthetic construct
  source 1..19: mol_type = other RNA
naagctacaggagaaggtg

SEQ ID NO: 186 - RNA, 19 nt, synthetic construct
  source 1..19: mol_type = other RNA
naagctacaggagaaggtn

SEQ ID NO: 187 - RNA, 19 nt, synthetic construct
  source 1..19: mol_type = other RNA
taagctacaggagaaggtg

SEQ ID NO: 188 - RNA, 19 nt, synthetic construct
  source 1..19: mol_type = other RNA
aaagctacaggagaaggtg

SEQ ID NO: 189 - RNA, 19 nt, synthetic construct
  source 1..19: mol_type = other RNA
gaagctacaggagaaggtg

SEQ ID NO: 190 - RNA, 19 nt, synthetic construct
  source 1..19: mol_type = other RNA
naagctacaggagaaggtg

SEQ ID NO: 191 - RNA, 19 nt, synthetic construct
  source 1..19: mol_type = other RNA
naagctacaggagaaggtn

SEQ ID NO: 192 - RNA, 19 nt, synthetic construct
  source 1..19: mol_type = other RNA
tcatccagtggatttgagg

SEQ ID NO: 193 - RNA, 19 nt, synthetic construct
  source 1..19: mol_type = other RNA
acatccagtggatttgagg

SEQ ID NO: 194 - RNA, 19 nt, synthetic construct
  source 1..19: mol_type = other RNA
ncatccagtggatttgagg

SEQ ID NO: 195 - RNA, 19 nt, synthetic construct
  source 1..19: mol_type = other RNA
ncatccagtggatttgagn

SEQ ID NO: 196 - RNA, 19 nt, synthetic construct
  source 1..19: mol_type = other RNA
tcatccagtggatttgagg

SEQ ID NO: 197 - RNA, 19 nt, synthetic construct
  source 1..19: mol_type = other RNA
acatccagtggatttgagg

SEQ ID NO: 198 - RNA, 19 nt, synthetic construct
  source 1..19: mol_type = other RNA
ncatccagtggatttgagg

SEQ ID NO: 199 - RNA, 19 nt, synthetic construct
  source 1..19: mol_type = other RNA
ncatccagtggatttgagn

SEQ ID NO: 200 - RNA, 19 nt, synthetic construct
  source 1..19: mol_type = other RNA
agttcagaggcagaatcta

SEQ ID NO: 201 - RNA, 19 nt, synthetic construct
  source 1..19: mol_type = other RNA
tgttcagaggcagaatcta

SEQ ID NO: 202 - RNA, 19 nt, synthetic construct
  source 1..19: mol_type = other RNA
ngttcagaggcagaatcta

SEQ ID NO: 203 - RNA, 19 nt, synthetic construct
  source 1..19: mol_type = other RNA
ngttcagaggcagaatctn

SEQ ID NO: 204 - RNA, 19 nt, synthetic construct
  source 1..19: mol_type = other RNA
agttcagaggcagaatcta

SEQ ID NO: 205 - RNA, 19 nt, synthetic construct
  source 1..19: mol_type = other RNA
tgttcagaggcagaatcta

SEQ ID NO: 206 - RNA, 19 nt, synthetic construct
  source 1..19: mol_type = other RNA
ngttcagaggcagaatcta

SEQ ID NO: 207 - RNA, 19 nt, synthetic construct
  source 1..19: mol_type = other RNA
ngttcagaggcagaatctn

SEQ ID NO: 208 - RNA, 19 nt, synthetic construct
  source 1..19: mol_type = other RNA
tgagttcagaggcagaatc

SEQ ID NO: 209 - RNA, 19 nt, synthetic construct
  source 1..19: mol_type = other RNA
agagttcagaggcagaatc

SEQ ID NO: 210 - RNA, 19 nt, synthetic construct
  source 1..19: mol_type = other RNA
ngagttcagaggcagaatn

SEQ ID NO: 211 - RNA, 19 nt, synthetic construct
  source 1..19: mol_type = other RNA
ngagttcagaggcagaatn

SEQ ID NO: 212 - RNA, 19 nt, synthetic construct
  source 1..19: mol_type = other RNA
accttattgggaacaccag

SEQ ID NO: 213 - RNA, 19 nt, synthetic construct
  source 1..19: mol_type = other RNA
tccttattgggaacaccag

SEQ ID NO: 214 - RNA, 19 nt, synthetic construct
  source 1..19: mol_type = other RNA
nccttattgggaacaccag

SEQ ID NO: 215 - RNA, 19 nt, synthetic construct
  source 1..19: mol_type = other RNA
nccttattgggaacaccan

SEQ ID NO: 216 - RNA, 19 nt, synthetic construct
  source 1..19: mol_type = other RNA
tcaccttattgggaacacc

SEQ ID NO: 217 - RNA, 19 nt, synthetic construct
  source 1..19: mol_type = other RNA
acaccttattgggaacacc

SEQ ID NO: 218 - RNA, 19 nt, synthetic construct
  source 1..19: mol_type = other RNA
ccaccttattgggaacacc

SEQ ID NO: 219 - RNA, 19 nt, synthetic construct
  source 1..19: mol_type = other RNA
ncaccttattgggaacacc

SEQ ID NO: 220 - RNA, 19 nt, synthetic construct
  source 1..19: mol_type = other RNA
ncaccttattgggaacacn

SEQ ID NO: 221 - RNA, 19 nt, synthetic construct
  source 1..19: mol_type = other RNA
tcaccttattgggaacacc

SEQ ID NO: 222 - RNA, 19 nt, synthetic construct
  source 1..19: mol_type = other RNA
acaccttattgggaacacc

SEQ ID NO: 223 - RNA, 19 nt, synthetic construct
  source 1..19: mol_type = other RNA
ccaccttattgggaacacc

SEQ ID NO: 224 - RNA, 19 nt, synthetic construct
  source 1..19: mol_type = other RNA
ncaccttattgggaacacc

SEQ ID NO: 225 - RNA, 19 nt, synthetic construct
  source 1..19: mol_type = other RNA
ncaccttattgggaacacn

SEQ ID NO: 226 - RNA, 19 nt, synthetic construct
  source 1..19: mol_type = other RNA
tcatccaagtgccagctaa

SEQ ID NO: 227 - RNA, 19 nt, synthetic construct
  source 1..19: mol_type = other RNA
acatccaagtgccagctaa

SEQ ID NO: 228 - RNA, 19 nt, synthetic construct
  source 1..19: mol_type = other RNA
ccatccaagtgccagctaa

SEQ ID NO: 229 - RNA, 19 nt, synthetic construct
  source 1..19: mol_type = other RNA
ncatccaagtgccagctaa

SEQ ID NO: 230 - RNA, 19 nt, synthetic construct
  source 1..19: mol_type = other RNA
ncatccaagtgccagctan

SEQ ID NO: 231 - RNA, 19 nt, synthetic construct
  source 1..19: mol_type = other RNA
tcatccaagtgccagctaa

SEQ ID NO: 232 - RNA, 19 nt, synthetic construct
  source 1..19: mol_type = other RNA
acatccaagtgccagctaa

SEQ ID NO: 233 - RNA, 19 nt, synthetic construct
  source 1..19: mol_type = other RNA
ccatccaagtgccagctaa

SEQ ID NO: 234 - RNA, 19 nt, synthetic construct
  source 1..19: mol_type = other RNA
ncatccaagtgccagctaa

SEQ ID NO: 235 - RNA, 19 nt, synthetic construct
  source 1..19: mol_type = other RNA
ncatccaagtgccagctan

SEQ ID NO: 236 - RNA, 19 nt, synthetic construct
  source 1..19: mol_type = other RNA
agatactcccttctcatta

SEQ ID NO: 237 - RNA, 19 nt, synthetic construct
  source 1..19: mol_type = other RNA
tgatactcccttctcatta

SEQ ID NO: 238 - RNA, 19 nt, synthetic construct
  source 1..19: mol_type = other RNA
ngatactcccttctcatta

SEQ ID NO: 239 - RNA, 19 nt, synthetic construct
  source 1..19: mol_type = other RNA
ngatactcccttctcattn

SEQ ID NO: 240 - RNA, 19 nt, synthetic construct
  source 1..19: mol_type = other RNA
agatactcccttctcatta

SEQ ID NO: 241 - RNA, 19 nt, synthetic construct
  source 1..19: mol_type = other RNA
tgatactcccttctcatta

SEQ ID NO: 242 - RNA, 19 nt, synthetic construct
  source 1..19: mol_type = other RNA
ngatactcccttctcatta

SEQ ID NO: 243 - RNA, 19 nt, synthetic construct
  source 1..19: mol_type = other RNA
ngatactcccttctcattn

SEQ ID NO: 244 - RNA, 19 nt, synthetic construct
  source 1..19: mol_type = other RNA
tcacagatactcccttctc

SEQ ID NO: 245 - RNA, 19 nt, synthetic construct
  source 1..19: mol_type = other RNA
acacagatactcccttctc

SEQ ID NO: 246 - RNA, 19 nt, synthetic construct
  source 1..19: mol_type = other RNA
ncacagatactcccttctc

SEQ ID NO: 247 - RNA, 19 nt, synthetic construct
  source 1..19: mol_type = other RNA
ncacagatactcccttctn

SEQ ID NO: 248 - RNA, 19 nt, synthetic construct
  source 1..19: mol_type = other RNA
tcacagatactcccttctc

SEQ ID NO: 249 - RNA, 19 nt, synthetic construct
  source 1..19: mol_type = other RNA
acacagatactcccttctc

SEQ ID NO: 250 - RNA, 19 nt, synthetic construct
  source 1..19: mol_type = other RNA
ncacagatactcccttctc

SEQ ID NO: 251 - RNA, 19 nt, synthetic construct
  source 1..19: mol_type = other RNA
ncacagatactcccttctn

SEQ ID NO: 252 - RNA, 19 nt, synthetic construct
  source 1..19: mol_type = other RNA
tgttcgatgatgctgatgc

SEQ ID NO: 253 - RNA, 19 nt, synthetic construct
  source 1..19: mol_type = other RNA
agttcgatgatgctgatgc

SEQ ID NO: 254 - RNA, 19 nt, synthetic construct
  source 1..19: mol_type = other RNA
ggttcgatgatgctgatgc

SEQ ID NO: 255 - RNA, 19 nt, synthetic construct
  source 1..19: mol_type = other RNA
ngttcgatgatgctgatgc

SEQ ID NO: 256 - RNA, 19 nt, synthetic construct
  source 1..19: mol_type = other RNA
ngttcgatgatgctgatgn

SEQ ID NO: 257 - RNA, 19 nt, synthetic construct
  source 1..19: mol_type = other RNA
tgttcgatgatgctgatgc

SEQ ID NO: 258 - RNA, 19 nt, synthetic construct
  source 1..19: mol_type = other RNA
agttcgatgatgctgatgc

SEQ ID NO: 259 - RNA, 19 nt, synthetic construct
  source 1..19: mol_type = other RNA
ggttcgatgatgctgatgc

SEQ ID NO: 260 - RNA, 19 nt, synthetic construct
  source 1..19: mol_type = other RNA
ngttcgatgatgctgatgc

SEQ ID NO: 261 - RNA, 19 nt, synthetic construct
  source 1..19: mol_type = other RNA
ngttcgatgatgctgatgn

SEQ ID NO: 262 - RNA, 19 nt, synthetic construct
  source 1..19: mol_type = other RNA
acctttccattcctgttca

SEQ ID NO: 263 - RNA, 19 nt, synthetic construct
  source 1..19: mol_type = other RNA
tcctttccattcctgttca

SEQ ID NO: 264 - RNA, 19 nt, synthetic construct
  source 1..19: mol_type = other RNA
ncctttccattcctgttca

SEQ ID NO: 265 - RNA, 19 nt, synthetic construct
  source 1..19: mol_type = other RNA
ncctttccattcctgttcn

SEQ ID NO: 266 - RNA, 19 nt, synthetic construct
  source 1..19: mol_type = other RNA
atagacacggactcggtag

SEQ ID NO: 267 - RNA, 19 nt, synthetic construct
  source 1..19: mol_type = other RNA
ttagacacggactcggtag

SEQ ID NO: 268 - RNA, 19 nt, synthetic construct
  source 1..19: mol_type = other RNA
ntagacacggactcggtag

SEQ ID NO: 269 - RNA, 19 nt, synthetic construct
  source 1..19: mol_type = other RNA
ntagacacggactcggtan

SEQ ID NO: 270 - RNA, 19 nt, synthetic construct
  source 1..19: mol_type = other RNA
aacaatttctggcttccca

SEQ ID NO: 271 - RNA, 19 nt, synthetic construct
  source 1..19: mol_type = other RNA
tacaatttctggcttccca

SEQ ID NO: 272 - RNA, 19 nt, synthetic construct
  source 1..19: mol_type = other RNA
nacaatttctggcttccca

SEQ ID NO: 273 - RNA, 19 nt, synthetic construct
  source 1..19: mol_type = other RNA
nacaatttctggcttcccn

SEQ ID NO: 274 - RNA, 19 nt, synthetic construct
  source 1..19: mol_type = other RNA
atactcccttctcattagg

SEQ ID NO: 275 - RNA, 19 nt, synthetic construct
  source 1..19: mol_type = other RNA
ttactcccttctcattagg

SEQ ID NO: 276 - RNA, 19 nt, synthetic construct
  source 1..19: mol_type = other RNA
ntactcccttctcattagg

SEQ ID NO: 277 - RNA, 19 nt, synthetic construct
  source 1..19: mol_type = other RNA
ntactcccttctcattagn

SEQ ID NO: 278 - RNA, 19 nt, synthetic construct
  source 1..19: mol_type = other RNA
gaatggaaactgaacacaa

SEQ ID NO: 279 - RNA, 19 nt, synthetic construct
  source 1..19: mol_type = other RNA
gaatggaaactgaacacat

SEQ ID NO: 280 - RNA, 19 nt, synthetic construct
  source 1..19: mol_type = other RNA
gaatggaaactgaacacag

SEQ ID NO: 281 - RNA, 19 nt, synthetic construct
  source 1..19: mol_type = other RNA
gaatggaaactgaacacan

SEQ ID NO: 282 - RNA, 19 nt, synthetic construct
  source 1..19: mol_type = other RNA
naatggaaactgaacacan

SEQ ID NO: 283 - RNA, 19 nt, synthetic construct
  modified_base 12: mod_base = i
  source 1..19: mol_type = other RNA
gaatggaaactnaacacaa

SEQ ID NO: 284 - RNA, 19 nt, synthetic construct
  modified_base 12: mod_base = i
  source 1..19: mol_type = other RNA
gaatggaaactnaacacat

SEQ ID NO: 285 - RNA, 19 nt, synthetic construct
  modified_base 12: mod_base = i
  source 1..19: mol_type = other RNA
gaatggaaactnaacacag

SEQ ID NO: 286 - RNA, 19 nt, synthetic construct
  modified_base 12: mod_base = i
  source 1..19: mol_type = other RNA
gaatggaaactnaacacan

SEQ ID NO: 287 - RNA, 19 nt, synthetic construct
  modified_base 12: mod_base = i
  source 1..19: mol_type = other RNA
naatggaaactnaacacan

SEQ ID NO: 288 - RNA, 19 nt, synthetic construct
  source 1..19: mol_type = other RNA
gtaggtgctcaaaacatca

SEQ ID NO: 289 - RNA, 19 nt, synthetic construct
  source 1..19: mol_type = other RNA
gtaggtgctcaaaacatct

SEQ ID NO: 290 - RNA, 19 nt, synthetic construct
  source 1..19: mol_type = other RNA
gtaggtgctcaaaacatcn

SEQ ID NO: 291 - RNA, 19 nt, synthetic construct
  source 1..19: mol_type = other RNA
ntaggtgctcaaaacatcn

SEQ ID NO: 292 - RNA, 19 nt, synthetic construct
  source 1..19: mol_type = other RNA
gcaatgaacaggaatggaa

SEQ ID NO: 293 - RNA, 19 nt, synthetic construct
  source 1..19: mol_type = other RNA
gcaatgaacaggaatggat

SEQ ID NO: 294 - RNA, 19 nt, synthetic construct
  source 1..19: mol_type = other RNA
gcaatgaacaggaatggan

SEQ ID NO: 295 - RNA, 19 nt, synthetic construct
  source 1..19: mol_type = other RNA
ncaatgaacaggaatggan

SEQ ID NO: 296 - RNA, 19 nt, synthetic construct
  modified_base 16: mod_base = i
  source 1..19: mol_type = other RNA
gcaatgaacaggaatngaa

SEQ ID NO: 297 - RNA, 19 nt, synthetic construct
  modified_base 16: mod_base = i
  source 1..19: mol_type = other RNA
gcaatgaacaggaatngat

SEQ ID NO: 298 - RNA, 19 nt, synthetic construct
  modified_base 16: mod_base = i
  source 1..19: mol_type = other RNA
gcaatgaacaggaatngan

SEQ ID NO: 299 - RNA, 19 nt, synthetic construct
  modified_base 16: mod_base = i
  source 1..19: mol_type = other RNA
ncaatgaacaggaatngan

SEQ ID NO: 300 - RNA, 19 nt, synthetic construct
  source 1..19: mol_type = other RNA
aatggaaactgaacacaga

SEQ ID NO: 301 - RNA, 19 nt, synthetic construct
  source 1..19: mol_type = other RNA
aatggaaactgaacacagt

SEQ ID NO: 302 - RNA, 19 nt, synthetic construct
  source 1..19: mol_type = other RNA
aatggaaactgaacacagg

SEQ ID NO: 303 - RNA, 19 nt, synthetic construct
  source 1..19: mol_type = other RNA
aatggaaactgaacacagn

SEQ ID NO: 304 - RNA, 19 nt, synthetic construct
  source 1..19: mol_type = other RNA
natggaaactgaacacagn

SEQ ID NO: 305 - RNA, 19 nt, synthetic construct
  modified_base 18: mod_base = i
  source 1..19: mol_type = other RNA
aatggaaactgaacacana

SEQ ID NO: 306 - RNA, 19 nt, synthetic construct
  modified_base 18: mod_base = i
  source 1..19: mol_type = other RNA
aatggaaactgaacacant

SEQ ID NO: 307 - RNA, 19 nt, synthetic construct
  modified_base 18: mod_base = i
  source 1..19: mol_type = other RNA
aatggaaactgaacacang

SEQ ID NO: 308 - RNA, 19 nt, synthetic construct
  modified_base 18: mod_base = i
  source 1..19: mol_type = other RNA
aatggaaactgaacacann

SEQ ID NO: 309 - RNA, 19 nt, synthetic construct
  modified_base 18: mod_base = i
  source 1..19: mol_type = other RNA
natggaaactgaacacann

SEQ ID NO: 310 - RNA, 19 nt, synthetic construct
  source 1..19: mol_type = other RNA
cagattcctgggaagccaa

SEQ ID NO: 311 - RNA, 19 nt, synthetic construct
  source 1..19: mol_type = other RNA
cagattcctgggaagccat

SEQ ID NO: 312 - RNA, 19 nt, synthetic construct
  source 1..19: mol_type = other RNA
cagattcctgggaagccag

SEQ ID NO: 313 - RNA, 19 nt, synthetic construct
  source 1..19: mol_type = other RNA
cagattcctgggaagccan

SEQ ID NO: 314 - RNA, 19 nt, synthetic construct
  source 1..19: mol_type = other RNA
nagattcctgggaagccan

SEQ ID NO: 315 - RNA, 19 nt, synthetic construct
  modified_base 15: mod_base = i
  source 1..19: mol_type = other RNA
cagattcctgggaanccaa

SEQ ID NO: 316 - RNA, 19 nt, synthetic construct
  modified_base 15: mod_base = i
  source 1..19: mol_type = other RNA
cagattcctgggaanccat

SEQ ID NO: 317 - RNA, 19 nt, synthetic construct
  modified_base 15: mod_base = i
  source 1..19: mol_type = other RNA
cagattcctgggaanccag

SEQ ID NO: 318 - RNA, 19 nt, synthetic construct
  modified_base 15: mod_base = i
  source 1..19: mol_type = other RNA
cagattcctgggaanccan

SEQ ID NO: 319 - RNA, 19 nt, synthetic construct
  modified_base 15: mod_base = i
  source 1..19: mol_type = other RNA
nagattcctgggaanccan

SEQ ID NO: 320 - RNA, 19 nt, synthetic construct
  source 1..19: mol_type = other RNA
ctgggaagccagaaattgt

SEQ ID NO: 321 - RNA, 19 nt, synthetic construct
  source 1..19: mol_type = other RNA
ctgggaagccagaaattga

SEQ ID NO: 322 - RNA, 19 nt, synthetic construct
  source 1..19: mol_type = other RNA
ctgggaagccagaaattgn

SEQ ID NO: 323 - RNA, 19 nt, synthetic construct
  source 1..19: mol_type = other RNA
ntgggaagccagaaattgn

SEQ ID NO: 324 - RNA, 19 nt, synthetic construct
  source 1..19: mol_type = other RNA
cactggtgctgaagtgtaa

SEQ ID NO: 325 - RNA, 19 nt, synthetic construct
  source 1..19: mol_type = other RNA
cactggtgctgaagtgtat

SEQ ID NO: 326 - RNA, 19 nt, synthetic construct
  source 1..19: mol_type = other RNA
cactggtgctgaagtgtan

SEQ ID NO: 327 - RNA, 19 nt, synthetic construct
  source 1..19: mol_type = other RNA
nactggtgctgaagtgtan

SEQ ID NO: 328 - RNA, 19 nt, synthetic construct
  source 1..19: mol_type = other RNA
gacagaagcttggaaggta

SEQ ID NO: 329 - RNA, 19 nt, synthetic construct
  source 1..19: mol_type = other RNA
gacagaagcttggaaggtc

SEQ ID NO: 330 - RNA, 19 nt, synthetic construct
  source 1..19: mol_type = other RNA
gacagaagcttggaaggtt

SEQ ID NO: 331 - RNA, 19 nt, synthetic construct
  source 1..19: mol_type = other RNA
gacagaagcttggaaggtn

SEQ ID NO: 332 - RNA, 19 nt, synthetic construct
  source 1..19: mol_type = other RNA
nacagaagcttggaaggtn

SEQ ID NO: 333 - RNA, 19 nt, synthetic construct
  modified_base 17: mod_base = i
  source 1..19: mol_type = other RNA
gacagaagcttggaagnta

SEQ ID NO: 334 - RNA, 19 nt, synthetic construct
  modified_base 17: mod_base = i
  source 1..19: mol_type = other RNA
gacagaagcttggaagntc

SEQ ID NO: 335 - RNA, 19 nt, synthetic construct
  modified_base 17: mod_base = i
  source 1..19: mol_type = other RNA
gacagaagcttggaagntt

SEQ ID NO: 336 - RNA, 19 nt, synthetic construct
  modified_base 17: mod_base = i
  source 1..19: mol_type = other RNA
gacagaagcttggaagntn

SEQ ID NO: 337 - RNA, 19 nt, synthetic construct
  modified_base 17: mod_base = i
  source 1..19: mol_type = other RNA
nacagaagcttggaagntn

SEQ ID NO: 338 - RNA, 19 nt, synthetic construct
  source 1..19: mol_type = other RNA
ggatgaggggattttccga

SEQ ID NO: 339 - RNA, 19 nt, synthetic construct
  source 1..19: mol_type = other RNA
ggatgaggggattttccgg

SEQ ID NO: 340 - RNA, 19 nt, synthetic construct
  source 1..19: mol_type = other RNA
ggatgaggggattttccgt

SEQ ID NO: 341 - RNA, 19 nt, synthetic construct
  source 1..19: mol_type = other RNA
ggatgaggggattttccgn

SEQ ID NO: 342 - RNA, 19 nt, synthetic construct
  source 1..19: mol_type = other RNA
ngatgaggggattttccgn

SEQ ID NO: 343 - RNA, 19 nt, synthetic construct
  modified_base 18: mod_base = i
  source 1..19: mol_type = other RNA
ggatgaggggattttccna

SEQ ID NO: 344 - RNA, 19 nt, synthetic construct
  modified_base 18: mod_base = i
  source 1..19: mol_type = other RNA
ggatgaggggattttccng

SEQ ID NO: 345 - RNA, 19 nt, synthetic construct
  modified_base 18: mod_base = i
  source 1..19: mol_type = other RNA
ggatgaggggattttccnt

SEQ ID NO: 346 - RNA, 19 nt, synthetic construct
  modified_base 18: mod_base = i
  source 1..19: mol_type = other RNA
ggatgaggggattttccnn

SEQ ID NO: 347 - RNA, 19 nt, synthetic construct
  modified_base 18: mod_base = i
  source 1..19: mol_type = other RNA
ngatgaggggattttccnn

SEQ ID NO: 348 - RNA, 19 nt, synthetic construct
  source 1..19: mol_type = other RNA
attcctgggaagctagaaa

SEQ ID NO: 349 - RNA, 19 nt, synthetic construct
  source 1..19: mol_type = other RNA
attcctgggaagctagaat

SEQ ID NO: 350 - RNA, 19 nt, synthetic construct
  source 1..19: mol_type = other RNA
attcctgggaagctagaan

SEQ ID NO: 351 - RNA, 19 nt, synthetic construct
  source 1..19: mol_type = other RNA
nttcctgggaagctagaan

SEQ ID NO: 352 - RNA, 19 nt, synthetic construct
  source 1..19: mol_type = other RNA
attctgcctctgaactcac

SEQ ID NO: 353 - RNA, 19 nt, synthetic construct
  source 1..19: mol_type = other RNA
attctgcctctgaactcac

SEQ ID NO: 354 - RNA, 19 nt, synthetic construct
  source 1..19: mol_type = other RNA
attctgcctctgaactcat

SEQ ID NO: 355 - RNA, 19 nt, synthetic construct
  source 1..19: mol_type = other RNA
attctgcctctgaactcan

SEQ ID NO: 356 - RNA, 19 nt, synthetic construct
  source 1..19: mol_type = other RNA
nttctgcctctgaactcan

SEQ ID NO: 357 - RNA, 19 nt, synthetic construct
  source 1..19: mol_type = other RNA
ccctgcagggactcttaga

SEQ ID NO: 358 - RNA, 19 nt, synthetic construct
  source 1..19: mol_type = other RNA
ccctgcagggactcttagt

SEQ ID NO: 359 - RNA, 19 nt, synthetic construct
  source 1..19: mol_type = other RNA
ccctgcagggactcttagc

SEQ ID NO: 360 - RNA, 19 nt, synthetic construct
  source 1..19: mol_type = other RNA
ccctgcagggactcttagn

SEQ ID NO: 361 - RNA, 19 nt, synthetic construct
  source 1..19: mol_type = other RNA
ncctgcagggactcttagn

SEQ ID NO: 362 - RNA, 19 nt, synthetic construct
  source 1..19: mol_type = other RNA
cctgcagggactcttagct

SEQ ID NO: 363 - RNA, 19 nt, synthetic construct
  source 1..19: mol_type = other RNA
cctgcagggactcttagca

SEQ ID NO: 364 - RNA, 19 nt, synthetic construct
  source 1..19: mol_type = other RNA
cctgcagggactcttagcn

SEQ ID NO: 365 - RNA, 19 nt, synthetic construct
  source 1..19: mol_type = other RNA
nctgcagggactcttagcn

SEQ ID NO: 366 - RNA, 19 nt, synthetic construct
  modified_base 17: mod_base = i
  source 1..19: mol_type = other RNA
cctgcagggactcttanct

SEQ ID NO: 367 - RNA, 19 nt, synthetic construct
  modified_base 17: mod_base = i
  source 1..19: mol_type = other RNA
cctgcagggactcttanca

SEQ ID NO: 368 - RNA, 19 nt, synthetic construct
  modified_base 17: mod_base = i
  source 1..19: mol_type = other RNA
cctgcagggactcttancn

SEQ ID NO: 369 - RNA, 19 nt, synthetic construct
  modified_base 17: mod_base = i
  source 1..19: mol_type = other RNA
nctgcagggactcttancn

SEQ ID NO: 370 - RNA, 19 nt, synthetic construct
  source 1..19: mol_type = other RNA
ccaccttctcctgtagctt

SEQ ID NO: 371 - RNA, 19 nt, synthetic construct
  source 1..19: mol_type = other RNA
ccaccttctcctgtagcta

SEQ ID NO: 372 - RNA, 19 nt, synthetic construct
  source 1..19: mol_type = other RNA
ccaccttctcctgtagctn

SEQ ID NO: 373 - RNA, 19 nt, synthetic construct
  source 1..19: mol_type = other RNA
ncaccttctcctgtagctn

SEQ ID NO: 374 - RNA, 19 nt, synthetic construct
  modified_base 16: mod_base = i
  source 1..19: mol_type = other RNA
ccaccttctcctgtanctt

SEQ ID NO: 375 - RNA, 19 nt, synthetic construct
  modified_base 16: mod_base = i
  source 1..19: mol_type = other RNA
ccaccttctcctgtancta

SEQ ID NO: 376 - RNA, 19 nt, synthetic construct
  modified_base 16: mod_base = i
  source 1..19: mol_type = other RNA
ccaccttctcctgtanctn

SEQ ID NO: 377 - RNA, 19 nt, synthetic construct
  modified_base 16: mod_base = i
  source 1..19: mol_type = other RNA
ncaccttctcctgtanctn

SEQ ID NO: 378 - RNA, 19 nt, synthetic construct
  source 1..19: mol_type = other RNA
cttctcctgtagcttcaga

SEQ ID NO: 379 - RNA, 19 nt, synthetic construct
  source 1..19: mol_type = other RNA
cttctcctgtagcttcagt

SEQ ID NO: 380 - RNA, 19 nt, synthetic construct
  source 1..19: mol_type = other RNA
cttctcctgtagcttcagc

SEQ ID NO: 381 - RNA, 19 nt, synthetic construct
  source 1..19: mol_type = other RNA
cttctcctgtagcttcagn

SEQ ID NO: 382 - RNA, 19 nt, synthetic construct
  source 1..19: mol_type = other RNA
nttctcctgtagcttcagn

SEQ ID NO: 383 - RNA, 19 nt, synthetic construct
  modified_base 18: mod_base = i
  source 1..19: mol_type = other RNA
cttctcctgtagcttcana

SEQ ID NO: 384 - RNA, 19 nt, synthetic construct
  modified_base 18: mod_base = i
  source 1..19: mol_type = other RNA
cttctcctgtagcttcant

SEQ ID NO: 385 - RNA, 19 nt, synthetic construct
  modified_base 18: mod_base = i
  source 1..19: mol_type = other RNA
cttctcctgtagcttcanc

SEQ ID NO: 386 - RNA, 19 nt, synthetic construct
  modified_base 18: mod_base = i
  source 1..19: mol_type = other RNA
cttctcctgtagcttcann

SEQ ID NO: 387 - RNA, 19 nt, synthetic construct
  modified_base 18: mod_base = i
  source 1..19: mol_type = other RNA
nttctcctgtagcttcann

SEQ ID NO: 388 - RNA, 19 nt, synthetic construct
  source 1..19: mol_type = other RNA
tgctggtcctcagtctgta

SEQ ID NO: 389 - RNA, 19 nt, synthetic construct
  source 1..19: mol_type = other RNA
tgctggtcctcagtctgtt

SEQ ID NO: 390 - RNA, 19 nt, synthetic construct
  source 1..19: mol_type = other RNA
tgctggtcctcagtctgtg

SEQ ID NO: 391 - RNA, 19 nt, synthetic construct
  source 1..19: mol_type = other RNA
tgctggtcctcagtctgtn

SEQ ID NO: 392 - RNA, 19 nt, synthetic construct
  source 1..19: mol_type = other RNA
tgctggtcctcagtctgtn

SEQ ID NO: 393 - RNA, 19 nt, synthetic construct
  modified_base 17: mod_base = i
  source 1..19: mol_type = other RNA
tgctggtcctcagtctnta

SEQ ID NO: 394 - RNA, 19 nt, synthetic construct
  modified_base 17: mod_base = i
  source 1..19: mol_type = other RNA
tgctggtcctcagtctntt

SEQ ID NO: 395 - RNA, 19 nt, synthetic construct
  modified_base 17: mod_base = i
  source 1..19: mol_type = other RNA
tgctggtcctcagtctntg

SEQ ID NO: 396 - RNA, 19 nt, synthetic construct
  modified_base 17: mod_base = i
  source 1..19: mol_type = other RNA
tgctggtcctcagtctntn

SEQ ID NO: 397 - RNA, 19 nt, synthetic construct
  modified_base 17: mod_base = i
  source 1..19: mol_type = other RNA
tgctggtcctcagtctntn

SEQ ID NO: 398 - RNA, 19 nt, synthetic construct
  source 1..19: mol_type = other RNA
gctggtcctcagtctgtga

SEQ ID NO: 399 - RNA, 19 nt, synthetic construct
  source 1..19: mol_type = other RNA
gctggtcctcagtctgtgt

SEQ ID NO: 400 - RNA, 19 nt, synthetic construct
  source 1..19: mol_type = other RNA
gctggtcctcagtctgtgn

SEQ ID NO: 401 - RNA, 19 nt, synthetic construct
  source 1..19: mol_type = other RNA
nctggtcctcagtctgtgn

SEQ ID NO: 402 - RNA, 19 nt, synthetic construct
  modified_base 18: mod_base = i
  source 1..19: mol_type = other RNA
gctggtcctcagtctgtna

SEQ ID NO: 403 - RNA, 19 nt, synthetic construct
  modified_base 18: mod_base = i
  source 1..19: mol_type = other RNA
gctggtcctcagtctgtnt

SEQ ID NO: 404 - RNA, 19 nt, synthetic construct
  modified_base 18: mod_base = i
  source 1..19: mol_type = other RNA
gctggtcctcagtctgtnn

SEQ ID NO: 405 - RNA, 19 nt, synthetic construct
  modified_base 18: mod_base = i
  source 1..19: mol_type = other RNA
nctggtcctcagtctgtnn

SEQ ID NO: 406 - RNA, 19 nt, synthetic construct
  modified_base 16: mod_base = i
  source 1..19: mol_type = other RNA
gctggtcctcagtctntga

SEQ ID NO: 407 - RNA, 19 nt, synthetic construct
  modified_base 16: mod_base = i
  source 1..19: mol_type = other RNA
gctggtcctcagtctntgt

SEQ ID NO: 408 - RNA, 19 nt, synthetic construct
  modified_base 16: mod_base = i
  source 1..19: mol_type = other RNA
gctggtcctcagtctntgn

SEQ ID NO: 409 - RNA, 19 nt, synthetic construct
  modified_base 16: mod_base = i
  source 1..19: mol_type = other RNA
nctggtcctcagtctntgn

SEQ ID NO: 410 - RNA, 19 nt, synthetic construct
  source 1..19: mol_type = other RNA
tccgtgtctaccagattca

SEQ ID NO: 411 - RNA, 19 nt, synthetic construct
  source 1..19: mol_type = other RNA
tccgtgtctaccagattct

SEQ ID NO: 412 - RNA, 19 nt, synthetic construct
  source 1..19: mol_type = other RNA
tccgtgtctaccagattcc

SEQ ID NO: 413 - RNA, 19 nt, synthetic construct
  source 1..19: mol_type = other RNA
tccgtgtctaccagattcn

SEQ ID NO: 414 - RNA, 19 nt, synthetic construct
  source 1..19: mol_type = other RNA
nccgtgtctaccagattcn

SEQ ID NO: 415 - RNA, 19 nt, synthetic construct
  modified_base 14: mod_base = i
  source 1..19: mol_type = other RNA
tccgtgtctaccanattca

SEQ ID NO: 416 - RNA, 19 nt, synthetic construct
  modified_base 14: mod_base = i
  source 1..19: mol_type = other RNA
tccgtgtctaccanattct

SEQ ID NO: 417 - RNA, 19 nt, synthetic construct
  modified_base 14: mod_base = i
  source 1..19: mol_type = other RNA
tccgtgtctaccanattcc

SEQ ID NO: 418 - RNA, 19 nt, synthetic construct
  modified_base 14: mod_base = i
  source 1..19: mol_type = other RNA
tccgtgtctaccanattcn

SEQ ID NO: 419 - RNA, 19 nt, synthetic construct
  modified_base 14: mod_base = i
  source 1..19: mol_type = other RNA
nccgtgtctaccanattcn

SEQ ID NO: 420 - RNA, 19 nt, synthetic construct
  source 1..19: mol_type = other RNA
cgtgtctaccagattccta

SEQ ID NO: 421 - RNA, 19 nt, synthetic construct
  source 1..19: mol_type = other RNA
cgtgtctaccagattcctt

SEQ ID NO: 422 - RNA, 19 nt, synthetic construct
  source 1..19: mol_type = other RNA
cgtgtctaccagattcctg

SEQ ID NO: 423 - RNA, 19 nt, synthetic construct
  source 1..19: mol_type = other RNA
cgtgtctaccagattcctn

SEQ ID NO: 424 - RNA, 19 nt, synthetic construct
  source 1..19: mol_type = other RNA
ngtgtctaccagattcctn

SEQ ID NO: 425 - RNA, 19 nt, synthetic construct
  source 1..19: mol_type = other RNA
caccttctcctgtagctta

SEQ ID NO: 426 - RNA, 19 nt, synthetic construct
  source 1..19: mol_type = other RNA
caccttctcctgtagcttt

SEQ ID NO: 427 - RNA, 19 nt, synthetic construct
  source 1..19: mol_type = other RNA
caccttctcctgtagcttc

SEQ ID NO: 428 - RNA, 19 nt, synthetic construct
  source 1..19: mol_type = other RNA
caccttctcctgtagcttn

SEQ ID NO: 429 - RNA, 19 nt, synthetic construct
  source 1..19: mol_type = other RNA
naccttctcctgtagcttn

SEQ ID NO: 430 - RNA, 19 nt, synthetic construct
  modified_base 15: mod_base = i
  source 1..19: mol_type = other RNA
caccttctcctgtanctta

SEQ ID NO: 431 - RNA, 19 nt, synthetic construct
  modified_base 15: mod_base = i
  source 1..19: mol_type = other RNA
caccttctcctgtancttt

SEQ ID NO: 432 - RNA, 19 nt, synthetic construct
  modified_base 15: mod_base = i
  source 1..19: mol_type = other RNA
caccttctcctgtancttc

SEQ ID NO: 433 - RNA, 19 nt, synthetic construct
  modified_base 15: mod_base = i
  source 1..19: mol_type = other RNA
caccttctcctgtancttn

SEQ ID NO: 434 - RNA, 19 nt, synthetic construct
  modified_base 15: mod_base = i
  source 1..19: mol_type = other RNA
naccttctcctgtancttn

SEQ ID NO: 435 - RNA, 19 nt, synthetic construct
  source 1..19: mol_type = other RNA
cctcaaatccactggatga

SEQ ID NO: 436 - RNA, 19 nt, synthetic construct
  source 1..19: mol_type = other RNA
cctcaaatccactggatgt

SEQ ID NO: 437 - RNA, 19 nt, synthetic construct
  source 1..19: mol_type = other RNA
cctcaaatccactggatgn

SEQ ID NO: 438 - RNA, 19 nt, synthetic construct
  source 1..19: mol_type = other RNA
nctcaaatccactggatgn

SEQ ID NO: 439 - RNA, 19 nt, synthetic construct
  modified_base 14: mod_base = i
  source 1..19: mol_type = other RNA
cctcaaatccactngatga

SEQ ID NO: 440 - RNA, 19 nt, synthetic construct
  modified_base 14: mod_base = i
  source 1..19: mol_type = other RNA
cctcaaatccactngatgt

SEQ ID NO: 441 - RNA, 19 nt, synthetic construct
  modified_base 14: mod_base = i
  source 1..19: mol_type = other RNA
cctcaaatccactngatgn

SEQ ID NO: 442 - RNA, 19 nt, synthetic construct
  modified_base 14: mod_base = i
  source 1..19: mol_type = other RNA
nctcaaatccactngatgn

SEQ ID NO: 443 - RNA, 19 nt, synthetic construct
  source 1..19: mol_type = other RNA
tagattctgcctctgaact

SEQ ID NO: 444 - RNA, 19 nt, synthetic construct
  source 1..19: mol_type = other RNA
tagattctgcctctgaaca

SEQ ID NO: 445 - RNA, 19 nt, synthetic construct
  source 1..19: mol_type = other RNA
tagattctgcctctgaacn

SEQ ID NO: 446 - RNA, 19 nt, synthetic construct
  source 1..19: mol_type = other RNA
nagattctgcctctgaacn

SEQ ID NO: 447 - RNA, 19 nt, synthetic construct
  modified_base 15: mod_base = i
  source 1..19: mol_type = other RNA
tagattctgcctctnaact

SEQ ID NO: 448 - RNA, 19 nt, synthetic construct
  modified_base 15: mod_base = i
  source 1..19: mol_type = other RNA
tagattctgcctctnaaca

SEQ ID NO: 449 - RNA, 19 nt, synthetic construct
  modified_base 15: mod_base = i
  source 1..19: mol_type = other RNA
tagattctgcctctnaacn

SEQ ID NO: 450 - RNA, 19 nt, synthetic construct
  modified_base 15: mod_base = i
  source 1..19: mol_type = other RNA
nagattctgcctctnaacn

SEQ ID NO: 451 - RNA, 19 nt, synthetic construct
  source 1..19: mol_type = other RNA
gattctgcctctgaactca

SEQ ID NO: 452 - RNA, 19 nt, synthetic construct
  source 1..19: mol_type = other RNA
gattctgcctctgaactct

SEQ ID NO: 453 - RNA, 19 nt, synthetic construct
  source 1..19: mol_type = other RNA
gattctgcctctgaactcn

SEQ ID NO: 454 - RNA, 19 nt, synthetic construct
  source 1..19: mol_type = other RNA
nattctgcctctgaactcn

SEQ ID NO: 455 - RNA, 19 nt, synthetic construct
  source 1..19: mol_type = other RNA
ctggtgttcccaataaggt

SEQ ID NO: 456 - RNA, 19 nt, synthetic construct
  source 1..19: mol_type = other RNA
ctggtgttcccaataagga

SEQ ID NO: 457 - RNA, 19 nt, synthetic construct
  source 1..19: mol_type = other RNA
ctggtgttcccaataaggn

SEQ ID NO: 458 - RNA, 19 nt, synthetic construct
  source 1..19: mol_type = other RNA
ntggtgttcccaataaggn

SEQ ID NO: 459 - RNA, 19 nt, synthetic construct
  source 1..19: mol_type = other RNA
ggtgttcccaataaggtga

SEQ ID NO: 460 - RNA, 19 nt, synthetic construct
  source 1..19: mol_type = other RNA
ggtgttcccaataaggtgt

SEQ ID NO: 461 - RNA, 19 nt, synthetic construct
  source 1..19: mol_type = other RNA
ggtgttcccaataaggtgg

SEQ ID NO: 462 - RNA, 19 nt, synthetic construct
  source 1..19: mol_type = other RNA
ggtgttcccaataaggtgn

SEQ ID NO: 463 - RNA, 19 nt, synthetic construct
  source 1..19: mol_type = other RNA
ngtgttcccaataaggtgn

SEQ ID NO: 464 - RNA, 19 nt, synthetic construct
  modified_base 15: mod_base = i
  source 1..19: mol_type = other RNA
ggtgttcccaataangtga

SEQ ID NO: 465 - RNA, 19 nt, synthetic construct
  modified_base 15: mod_base = i
  source 1..19: mol_type = other RNA
ggtgttcccaataangtgt

SEQ ID NO: 466 - RNA, 19 nt, synthetic construct
  modified_base 15: mod_base = i
  source 1..19: mol_type = other RNA
ggtgttcccaataangtgg

SEQ ID NO: 467 - RNA, 19 nt, synthetic construct
  modified_base 15: mod_base = i
  source 1..19: mol_type = other RNA
ggtgttcccaataangtgn

SEQ ID NO: 468 - RNA, 19 nt, synthetic construct
  modified_base 15: mod_base = i
  source 1..19: mol_type = other RNA
ngtgttcccaataangtgn

SEQ ID NO: 469 - RNA, 19 nt, synthetic construct
  source 1..19: mol_type = other RNA
ttagctggcacttggatga

SEQ ID NO: 470 - RNA, 19 nt, synthetic construct
  source 1..19: mol_type = other RNA
ttagctggcacttggatgt

SEQ ID NO: 471 - RNA, 19 nt, synthetic construct
  source 1..19: mol_type = other RNA
ttagctggcacttggatgg

SEQ ID NO: 472 - RNA, 19 nt, synthetic construct
  source 1..19: mol_type = other RNA
ttagctggcacttggatgn

SEQ ID NO: 473 - RNA, 19 nt, synthetic construct
  source 1..19: mol_type = other RNA
ntagctggcacttggatgn

SEQ ID NO: 474 - RNA, 19 nt, synthetic construct
  modified_base 14: mod_base = i
  source 1..19: mol_type = other RNA
ttagctggcacttngatga

SEQ ID NO: 475 - RNA, 19 nt, synthetic construct
  modified_base 14: mod_base = i
  source 1..19: mol_type = other RNA
ttagctggcacttngatgt

SEQ ID NO: 476 - RNA, 19 nt, synthetic construct
  modified_base 14: mod_base = i
  source 1..19: mol_type = other RNA
ttagctggcacttngatgg

SEQ ID NO: 477 - RNA, 19 nt, synthetic construct
  modified_base 14: mod_base = i
  source 1..19: mol_type = other RNA
ttagctggcacttngatgn

SEQ ID NO: 478 - RNA, 19 nt, synthetic construct
  modified_base 14: mod_base = i
  source 1..19: mol_type = other RNA
ntagctggcacttngatgn

SEQ ID NO: 479 - RNA, 19 nt, synthetic construct
  source 1..19: mol_type = other RNA
taatgagaagggagtatct

SEQ ID NO: 480 - RNA, 19 nt, synthetic construct
  source 1..19: mol_type = other RNA
taatgagaagggagtatca

SEQ ID NO: 481 - RNA, 19 nt, synthetic construct
  source 1..19: mol_type = other RNA
taatgagaagggagtatcn

SEQ ID NO: 482 - RNA, 19 nt, synthetic construct
  source 1..19: mol_type = other RNA
naatgagaagggagtatcn

SEQ ID NO: 483 - RNA, 19 nt, synthetic construct
  modified_base 14: mod_base = i
  source 1..19: mol_type = other RNA
taatgagaagggantatct

SEQ ID NO: 484 - RNA, 19 nt, synthetic construct
  modified_base 14: mod_base = i
  source 1..19: mol_type = other RNA
taatgagaagggantatca

SEQ ID NO: 485 - RNA, 19 nt, synthetic construct
  modified_base 14: mod_base = i
  source 1..19: mol_type = other RNA
taatgagaagggantatcn

SEQ ID NO: 486 - RNA, 19 nt, synthetic construct
  modified_base 14: mod_base = i
  source 1..19: mol_type = other RNA
naatgagaagggantatcn

SEQ ID NO: 487 - RNA, 19 nt, synthetic construct
  source 1..19: mol_type = other RNA
gagaagggagtatctgtga

SEQ ID NO: 488 - RNA, 19 nt, synthetic construct
  source 1..19: mol_type = other RNA
gagaagggagtatctgtgt

SEQ ID NO: 489 - RNA, 19 nt, synthetic construct
  source 1..19: mol_type = other RNA
gagaagggagtatctgtgn

SEQ ID NO: 490 - RNA, 19 nt, synthetic construct
  source 1..19: mol_type = other RNA
nagaagggagtatctgtgn

SEQ ID NO: 491 - RNA, 19 nt, synthetic construct
  modified_base 16: mod_base = i
  source 1..19: mol_type = other RNA
gagaagggagtatctntga

SEQ ID NO: 492 - RNA, 19 nt, synthetic construct
  modified_base 16: mod_base = i
  source 1..19: mol_type = other RNA
gagaagggagtatctntgt

SEQ ID NO: 493 - RNA, 19 nt, synthetic construct
  modified_base 16: mod_base = i
  source 1..19: mol_type = other RNA
gagaagggagtatctntgn

SEQ ID NO: 494 - RNA, 19 nt, synthetic construct
  modified_base 16: mod_base = i
  source 1..19: mol_type = other RNA
nagaagggagtatctntgn

SEQ ID NO: 495 - RNA, 19 nt, synthetic construct
  source 1..19: mol_type = other RNA
gcatcagcatcatcgaaca

SEQ ID NO: 496 - RNA, 19 nt, synthetic construct
  source 1..19: mol_type = other RNA
gcatcagcatcatcgaact

SEQ ID NO: 497 - RNA, 19 nt, synthetic construct
  source 1..19: mol_type = other RNA
gcatcagcatcatcgaacc

SEQ ID NO: 498 - RNA, 19 nt, synthetic construct
  source 1..19: mol_type = other RNA
gcatcagcatcatcgaacn

SEQ ID NO: 499 - RNA, 19 nt, synthetic construct
  source 1..19: mol_type = other RNA
ncatcagcatcatcgaacn

SEQ ID NO: 500 - RNA, 19 nt, synthetic construct
  modified_base 15: mod_base = i
  source 1..19: mol_type = other RNA
gcatcagcatcatcnaaca

SEQ ID NO: 501 - RNA, 19 nt, synthetic construct
  modified_base 15: mod_base = i
  source 1..19: mol_type = other RNA
gcatcagcatcatcnaact

SEQ ID NO: 502 - RNA, 19 nt, synthetic construct
  modified_base 15: mod_base = i
  source 1..19: mol_type = other RNA
gcatcagcatcatcnaacc

SEQ ID NO: 503 - RNA, 19 nt, synthetic construct
  modified_base 15: mod_base = i
  source 1..19: mol_type = other RNA
gcatcagcatcatcnaacn

SEQ ID NO: 504 - RNA, 19 nt, synthetic construct
  modified_base 15: mod_base = i
  source 1..19: mol_type = other RNA
ncatcagcatcatcnaacn

SEQ ID NO: 505 - RNA, 19 nt, synthetic construct
  source 1..19: mol_type = other RNA
tgaacaggaatggaaaggt

SEQ ID NO: 506 - RNA, 19 nt, synthetic construct
  source 1..19: mol_type = other RNA
tgaacaggaatggaaagga

SEQ ID NO: 507 - RNA, 19 nt, synthetic construct
  source 1..19: mol_type = other RNA
tgaacaggaatggaaaggn

SEQ ID NO: 508 - RNA, 19 nt, synthetic construct
  source 1..19: mol_type = other RNA
ngaacaggaatggaaaggn

SEQ ID NO: 509 - RNA, 19 nt, synthetic construct
  source 1..19: mol_type = other RNA
ctaccgagtccgtgtctaa

SEQ ID NO: 510 - RNA, 19 nt, synthetic construct
  source 1..19: mol_type = other RNA
ctaccgagtccgtgtctat

SEQ ID NO: 511 - RNA, 19 nt, synthetic construct
  source 1..19: mol_type = other RNA
ctaccgagtccgtgtctan

SEQ ID NO: 512 - RNA, 19 nt, synthetic construct
  source 1..19: mol_type = other RNA
ntaccgagtccgtgtctan

SEQ ID NO: 513 - RNA, 19 nt, synthetic construct
  source 1..19: mol_type = other RNA
tgggaagccagaaattgta

SEQ ID NO: 514 - RNA, 19 nt, synthetic construct
  source 1..19: mol_type = other RNA
tgggaagccagaaattgtt

SEQ ID NO: 515 - RNA, 19 nt, synthetic construct
  source 1..19: mol_type = other RNA
tgggaagccagaaattgtn

SEQ ID NO: 516 - RNA, 19 nt, synthetic construct
  source 1..19: mol_type = other RNA
ngggaagccagaaattgtn

SEQ ID NO: 517 - RNA, 19 nt, synthetic construct
  source 1..19: mol_type = other RNA
cctaatgagaagggagtaa

SEQ ID NO: 518 - RNA, 19 nt, synthetic construct
  source 1..19: mol_type = other RNA
cctaatgagaagggagtat

SEQ ID NO: 519 - RNA, 19 nt, synthetic construct
  source 1..19: mol_type = other RNA
cctaatgagaagggagtan

SEQ ID NO: 520 - RNA, 19 nt, synthetic construct
  source 1..19: mol_type = other RNA
nctaatgagaagggagtan

SEQ ID NO: 521 - RNA, 21 nt, synthetic construct
  modified_base 1: mod_base = um
  modified_base 1^2: mod_base = OTHER; note = phosphorothioate linkage
  modified_base 2: mod_base = OTHER; note = 2'-fluorouridine
  modified_base 2^3: mod_base = OTHER; note = phosphorothioate linkage
  modified_base 3: mod_base = gm
  modified_base 3^4: mod_base = OTHER; note = phosphorothioate linkage
  modified_base 4: mod_base = OTHER; note = 2'-fluorouridine
  modified_base 5: mod_base = gm
  modified_base 6: mod_base = OTHER; note = 2'-fluorouridine
  modified_base 7: mod_base = um
  modified_base 8: mod_base = OTHER; note = 2'-fluorocytidine
  modified_base 9: mod_base = OTHER; note = 2'-O-methyladenosine
  modified_base 10: mod_base = OTHER; note = 2'-fluoroguanosine
  modified_base 11: mod_base = um
  modified_base 12: mod_base = OTHER; note = 2'-fluorouridine
  modified_base 13: mod_base = um
  modified_base 14: mod_base = OTHER; note = 2'-fluorocytidine
  modified_base 15: mod_base = cm
  modified_base 16: mod_base = OTHER; note = 2'-fluoroadenosine
  modified_base 17: mod_base = um
  modified_base 18: mod_base = OTHER; note = 2'-fluorouridine
  modified_base 19: mod_base = cm
  modified_base 20: mod_base = OTHER; note = 2'-fluorocytidine
  modified_base 20^21: mod_base = OTHER; note = phosphorothioate linkage
  modified_base 21: mod_base = gm
  source 1..21: mol_type = other RNA
ttgtgttcagtttccattccg

SEQ ID NO: 522 - RNA, 21 nt, synthetic construct
  modified_base 1: mod_base = OTHER; note = 5 -cyclopropyl phosphonate-2 -O-methyluridine
  modified_base 1^2: mod_base = OTHER; note = phosphorothioate linkage
  modified_base 2: mod_base = OTHER; note = 2'-fluorouridine
  modified_base 2^3: mod_base = OTHER; note = phosphorothioate linkage
  modified_base 3: mod_base = gm
  modified_base 3^4: mod_base = OTHER; note = phosphorothioate linkage
  modified_base 4: mod_base = OTHER; note = 2'-fluorouridine
  modified_base 5: mod_base = gm
  modified_base 6: mod_base = OTHER; note = 2'-fluorouridine
  modified_base 7: mod_base = um
  modified_base 8: mod_base = OTHER; note = 2'-fluorocytidine
  modified_base 9: mod_base = OTHER; note = 2'-O-methyladenosine
  modified_base 10: mod_base = OTHER; note = 2'-fluoroguanosine
  modified_base 11: mod_base = um
  modified_base 12: mod_base = OTHER; note = 2'-fluorouridine
  modified_base 13: mod_base = um
  modified_base 14: mod_base = OTHER; note = 2'-fluorocytidine
  modified_base 15: mod_base = cm
  modified_base 16: mod_base = OTHER; note = 2'-fluoroadenosine
  modified_base 17: mod_base = um
  modified_base 18: mod_base = OTHER; note = 2'-fluorouridine
  modified_base 19: mod_base = cm
  modified_base 20: mod_base = OTHER; note = 2'-fluorocytidine
  modified_base 20^21: mod_base = OTHER; note = phosphorothioate linkage
  modified_base 21: mod_base = gm
  source 1..21: mol_type = other RNA
ttgtgttcagtttccattccg

SEQ ID NO: 523 - RNA, 21 nt, synthetic construct
  modified_base 1: mod_base = um
  modified_base 1^2: mod_base = OTHER; note = phosphorothioate linkage
  modified_base 2: mod_base = OTHER; note = 2'-fluorocytidine
  modified_base 2^3: mod_base = OTHER; note = phosphorothioate linkage
  modified_base 3: mod_base = um
  modified_base 3^4: mod_base = OTHER; note = phosphorothioate linkage
  modified_base 4: mod_base = OTHER; note = 2'-fluoroguanosine
  modified_base 5: mod_base = um
  modified_base 6: mod_base = OTHER; note = 2'-fluoroguanosine
  modified_base 7: mod_base = um
  modified_base 8: mod_base = OTHER; note = 2'-fluorouridine
  modified_base 9: mod_base = cm
  modified_base 10: mod_base = OTHER; note = 2'-fluoroadenosine
  modified_base 11: mod_base = gm
  modified_base 12: mod_base = OTHER; note = 2'-fluorouridine
  modified_base 13: mod_base = um
  modified_base 14: mod_base = OTHER; note = 2'-fluorouridine
  modified_base 15: mod_base = cm
  modified_base 16: mod_base = OTHER; note = 2'-fluorocytidine
  modified_base 17: mod_base = OTHER; note = 2'-O-methyladenosine
  modified_base 18: mod_base = OTHER; note = 2'-fluorouridine
  modified_base 19: mod_base = um
  modified_base 20: mod_base = OTHER; note = 2'-fluorocytidine
  modified_base 20^21: mod_base = OTHER; note = phosphorothioate linkage
  modified_base 21: mod_base = cm
  source 1..21: mol_type = other RNA
tctgtgttcagtttccattcc

SEQ ID NO: 524 - RNA, 21 nt, synthetic construct
  modified_base 1: mod_base = OTHER; note = 5 -cyclopropyl phosphonate-2 -O-methyluridine
  modified_base 1^2: mod_base = OTHER; note = phosphorothioate linkage
  modified_base 2: mod_base = OTHER; note = 2'-fluorocytidine
  modified_base 2^3: mod_base = OTHER; note = phosphorothioate linkage
  modified_base 3: mod_base = um
  modified_base 3^4: mod_base = OTHER; note = phosphorothioate linkage
  modified_base 4: mod_base = OTHER; note = 2'-fluoroguanosine
  modified_base 5: mod_base = um
  modified_base 6: mod_base = OTHER; note = 2'-fluoroguanosine
  modified_base 7: mod_base = um
  modified_base 8: mod_base = OTHER; note = 2'-fluorouridine
  modified_base 9: mod_base = cm
  modified_base 10: mod_base = OTHER; note = 2'-fluoroadenosine
  modified_base 11: mod_base = gm
  modified_base 12: mod_base = OTHER; note = 2'-fluorouridine
  modified_base 13: mod_base = um
  modified_base 14: mod_base = OTHER; note = 2'-fluorouridine
  modified_base 15: mod_base = cm
  modified_base 16: mod_base = OTHER; note = 2'-fluorocytidine
  modified_base 17: mod_base = OTHER; note = 2'-O-methyladenosine
  modified_base 18: mod_base = OTHER; note = 2'-fluorouridine
  modified_base 19: mod_base = um
  modified_base 20: mod_base = OTHER; note = 2'-fluorocytidine
  modified_base 20^21: mod_base = OTHER; note = phosphorothioate linkage
  modified_base 21: mod_base = cm
  source 1..21: mol_type = other RNA
tctgtgttcagtttccattcc

SEQ ID NO: 525 - RNA, 21 nt, synthetic construct
  modified_base 1: mod_base = um
  modified_base 1^2: mod_base = OTHER; note = phosphorothioate linkage
  modified_base 2: mod_base = OTHER; note = 2'-fluorouridine
  modified_base 2^3: mod_base = OTHER; note = phosphorothioate linkage
  modified_base 3: mod_base = gm
  modified_base 3^4: mod_base = OTHER; note = phosphorothioate linkage
  modified_base 4: mod_base = OTHER; note = 2'-fluoroguanosine
  modified_base 5: mod_base = cm
  modified_base 6: mod_base = OTHER; note = 2'-fluorouridine
  modified_base 7: mod_base = um
  modified_base 8: mod_base = OTHER; note = 2'-fluorocytidine
  modified_base 9: mod_base = cm
  modified_base 10: mod_base = OTHER; note = 2'-fluorocytidine
  modified_base 11: mod_base = OTHER; note = 2'-O-methyladenosine
  modified_base 12: mod_base = OTHER; note = 2'-fluoroguanosine
  modified_base 13: mod_base = gm
  modified_base 14: mod_base = OTHER; note = 2'-fluoroadenosine
  modified_base 15: mod_base = OTHER; note = 2'-O-methyladenosine
  modified_base 16: mod_base = OTHER; note = 2'-fluorouridine
  modified_base 17: mod_base = cm
  modified_base 18: mod_base = OTHER; note = 2'-fluorouridine
  modified_base 19: mod_base = gm
  modified_base 20: mod_base = OTHER; note = 2'-fluoroguanosine
  modified_base 20^21: mod_base = OTHER; note = phosphorothioate linkage
  modified_base 21: mod_base = um
  source 1..21: mol_type = other RNA
ttggcttcccaggaatctggt

SEQ ID NO: 526 - RNA, 21 nt, synthetic construct
  modified_base 1: mod_base = OTHER; note = 5 -cyclopropyl phosphonate-2 -O-methyluridine
  modified_base 1^2: mod_base = OTHER; note = phosphorothioate linkage
  modified_base 2: mod_base = OTHER; note = 2'-fluorouridine
  modified_base 2^3: mod_base = OTHER; note = phosphorothioate linkage
  modified_base 3: mod_base = gm
  modified_base 3^4: mod_base = OTHER; note = phosphorothioate linkage
  modified_base 4: mod_base = OTHER; note = 2'-fluoroguanosine
  modified_base 5: mod_base = cm
  modified_base 6: mod_base = OTHER; note = 2'-fluorouridine
  modified_base 7: mod_base = um
  modified_base 8: mod_base = OTHER; note = 2'-fluorocytidine
  modified_base 9: mod_base = cm
  modified_base 10: mod_base = OTHER; note = 2'-fluorocytidine
  modified_base 11: mod_base = OTHER; note = 2'-O-methyladenosine
  modified_base 12: mod_base = OTHER; note = 2'-fluoroguanosine
  modified_base 13: mod_base = gm
  modified_base 14: mod_base = OTHER; note = 2'-fluoroadenosine
  modified_base 15: mod_base = OTHER; note = 2'-O-methyladenosine
  modified_base 16: mod_base = OTHER; note = 2'-fluorouridine
  modified_base 17: mod_base = cm
  modified_base 18: mod_base = OTHER; note = 2'-fluorouridine
  modified_base 19: mod_base = gm
  modified_base 20: mod_base = OTHER; note = 2'-fluoroguanosine
  modified_base 20^21: mod_base = OTHER; note = phosphorothioate linkage
  modified_base 21: mod_base = um
  source 1..21: mol_type = other RNA
ttggcttcccaggaatctggt

SEQ ID NO: 527 - RNA, 21 nt, synthetic construct
  modified_base 1: mod_base = OTHER; note = 2'-O-methyladenosine
  modified_base 1^2: mod_base = OTHER; note = phosphorothioate linkage
  modified_base 2: mod_base = OTHER; note = 2'-fluorocytidine
  modified_base 2^3: mod_base = OTHER; note = phosphorothioate linkage
  modified_base 3: mod_base = OTHER; note = 2'-O-methyladenosine
  modified_base 3^4: mod_base = OTHER; note = phosphorothioate linkage
  modified_base 4: mod_base = OTHER; note = 2'-fluoroadenosine
  modified_base 5: mod_base = um
  modified_base 6: mod_base = OTHER; note = 2'-fluorouridine
  modified_base 7: mod_base = um
  modified_base 8: mod_base = OTHER; note = 2'-fluorocytidine
  modified_base 9: mod_base = um
  modified_base 10: mod_base = OTHER; note = 2'-fluoroguanosine
  modified_base 11: mod_base = gm
  modified_base 12: mod_base = OTHER; note = 2'-fluorocytidine
  modified_base 13: mod_base = um
  modified_base 14: mod_base = OTHER; note = 2'-fluorouridine
  modified_base 15: mod_base = cm
  modified_base 16: mod_base = OTHER; note = 2'-fluorocytidine
  modified_base 17: mod_base = cm
  modified_base 18: mod_base = OTHER; note = 2'-fluoroadenosine
  modified_base 19: mod_base = gm
  modified_base 20: mod_base = OTHER; note = 2'-fluoroguanosine
  modified_base 20^21: mod_base = OTHER; note = phosphorothioate linkage
  modified_base 21: mod_base = OTHER; note = 2'-O-methyladenosine
  source 1..21: mol_type = other RNA
acaatttctggcttcccagga

SEQ ID NO: 528 - RNA, 21 nt, synthetic construct
  modified_base 1: mod_base = OTHER; note = 5 -cyclopropyl phosphonate-2 -O-methyladenosine
  modified_base 1^2: mod_base = OTHER; note = phosphorothioate linkage
  modified_base 2: mod_base = OTHER; note = 2'-fluorocytidine
  modified_base 2^3: mod_base = OTHER; note = phosphorothioate linkage
  modified_base 3: mod_base = OTHER; note = 2'-O-methyladenosine
  modified_base 3^4: mod_base = OTHER; note = phosphorothioate linkage
  modified_base 4: mod_base = OTHER; note = 2'-fluoroadenosine
  modified_base 5: mod_base = um
  modified_base 6: mod_base = OTHER; note = 2'-fluorouridine
  modified_base 7: mod_base = um
  modified_base 8: mod_base = OTHER; note = 2'-fluorocytidine
  modified_base 9: mod_base = um
  modified_base 10: mod_base = OTHER; note = 2'-fluoroguanosine
  modified_base 11: mod_base = gm
  modified_base 12: mod_base = OTHER; note = 2'-fluorocytidine
  modified_base 13: mod_base = um
  modified_base 14: mod_base = OTHER; note = 2'-fluorouridine
  modified_base 15: mod_base = cm
  modified_base 16: mod_base = OTHER; note = 2'-fluorocytidine
  modified_base 17: mod_base = cm
  modified_base 18: mod_base = OTHER; note = 2'-fluoroadenosine
  modified_base 19: mod_base = gm
  modified_base 20: mod_base = OTHER; note = 2'-fluoroguanosine
  modified_base 20^21: mod_base = OTHER; note = phosphorothioate linkage
  modified_base 21: mod_base = OTHER; note = 2'-O-methyladenosine
  source 1..21: mol_type = other RNA
acaatttctggcttcccagga

SEQ ID NO: 529 - RNA, 21 nt, synthetic construct
  modified_base 1: mod_base = um
  modified_base 1^2: mod_base = OTHER; note = phosphorothioate linkage
  modified_base 2: mod_base = OTHER; note = 2'-fluorouridine
  modified_base 2^3: mod_base = OTHER; note = phosphorothioate linkage
  modified_base 3: mod_base = OTHER; note = 2'-O-methyladenosine
  modified_base 3^4: mod_base = OTHER; note = phosphorothioate linkage
  modified_base 4: mod_base = OTHER; note = 2'-fluorocytidine
  modified_base 5: mod_base = OTHER; note = 2'-O-methyladenosine
  modified_base 6: mod_base = OTHER; note = 2'-fluorocytidine
  modified_base 7: mod_base = um
  modified_base 8: mod_base = OTHER; note = 2'-fluorouridine
  modified_base 9: mod_base = cm
  modified_base 10: mod_base = OTHER; note = 2'-fluoroadenosine
  modified_base 11: mod_base = gm
  modified_base 12: mod_base = OTHER; note = 2'-fluorocytidine
  modified_base 13: mod_base = OTHER; note = 2'-O-methyladenosine
  modified_base 14: mod_base = OTHER; note = 2'-fluorocytidine
  modified_base 15: mod_base = cm
  modified_base 16: mod_base = OTHER; note = 2'-fluoroadenosine
  modified_base 17: mod_base = gm
  modified_base 18: mod_base = OTHER; note = 2'-fluorouridine
  modified_base 19: mod_base = gm
  modified_base 20: mod_base = OTHER; note = 2'-fluoroguanosine
  modified_base 20^21: mod_base = OTHER; note = phosphorothioate linkage
  modified_base 21: mod_base = cm
  source 1..21: mol_type = other RNA
ttacacttcagcaccagtggc

SEQ ID NO: 530 - RNA, 21 nt, synthetic construct
  modified_base 1: mod_base = um
  modified_base 1^2: mod_base = OTHER; note = phosphorothioate linkage
  modified_base 2: mod_base = OTHER; note = 2'-fluoroadenosine
  modified_base 2^3: mod_base = OTHER; note = phosphorothioate linkage
  modified_base 3: mod_base = cm
  modified_base 3^4: mod_base = OTHER; note = phosphorothioate linkage
  modified_base 4: mod_base = OTHER; note = 2'-fluorocytidine
  modified_base 5: mod_base = um
  modified_base 6: mod_base = OTHER; note = 2'-fluorouridine
  modified_base 7: mod_base = cm
  modified_base 8: mod_base = OTHER; note = 2'-fluorocytidine
  modified_base 9: mod_base = OTHER; note = 2'-O-methyladenosine
  modified_base 10: mod_base = OTHER; note = 2'-fluoroadenosine
  modified_base 11: mod_base = gm
  modified_base 12: mod_base = OTHER; note = 2'-fluorocytidine
  modified_base 13: mod_base = um
  modified_base 14: mod_base = OTHER; note = 2'-fluorouridine
  modified_base 15: mod_base = cm
  modified_base 16: mod_base = OTHER; note = 2'-fluorouridine
  modified_base 17: mod_base = gm
  modified_base 18: mod_base = OTHER; note = 2'-fluorouridine
  modified_base 19: mod_base = cm
  modified_base 20: mod_base = OTHER; note = 2'-fluorocytidine
  modified_base 20^21: mod_base = OTHER; note = phosphorothioate linkage
  modified_base 21: mod_base = gm
  source 1..21: mol_type = other RNA
taccttccaagcttctgtccg

SEQ ID NO: 531 - RNA, 21 nt, synthetic construct
  modified_base 1: mod_base = um
  modified_base 1^2: mod_base = OTHER; note = phosphorothioate linkage
  modified_base 2: mod_base = OTHER; note = 2'-fluorocytidine
  modified_base 2^3: mod_base = OTHER; note = phosphorothioate linkage
  modified_base 3: mod_base = gm
  modified_base 3^4: mod_base = OTHER; note = phosphorothioate linkage
  modified_base 4: mod_base = OTHER; note = 2'-fluoroguanosine
  modified_base 5: mod_base = OTHER; note = 2'-O-methyladenosine
  modified_base 6: mod_base = OTHER; note = 2'-fluoroadenosine
  modified_base 7: mod_base = OTHER; note = 2'-O-methyladenosine
  modified_base 8: mod_base = OTHER; note = 2'-fluoroadenosine
  modified_base 9: mod_base = um
  modified_base 10: mod_base = OTHER; note = 2'-fluorocytidine
  modified_base 11: mod_base = cm
  modified_base 12: mod_base = OTHER; note = 2'-fluorocytidine
  modified_base 13: mod_base = cm
  modified_base 14: mod_base = OTHER; note = 2'-fluorouridine
  modified_base 15: mod_base = cm
  modified_base 16: mod_base = OTHER; note = 2'-fluoroadenosine
  modified_base 17: mod_base = um
  modified_base 18: mod_base = OTHER; note = 2'-fluorocytidine
  modified_base 19: mod_base = cm
  modified_base 20: mod_base = OTHER; note = 2'-fluorouridine
  modified_base 20^21: mod_base = OTHER; note = phosphorothioate linkage
  modified_base 21: mod_base = gm
  source 1..21: mol_type = other RNA
tcggaaaatcccctcatcctg

SEQ ID NO: 532 - RNA, 21 nt, synthetic construct
  modified_base 1: mod_base = um
  modified_base 1^2: mod_base = OTHER; note = phosphorothioate linkage
  modified_base 2: mod_base = OTHER; note = 2'-fluorouridine
  modified_base 2^3: mod_base = OTHER; note = phosphorothioate linkage
  modified_base 3: mod_base = um
  modified_base 3^4: mod_base = OTHER; note = phosphorothioate linkage
  modified_base 4: mod_base = OTHER; note = 2'-fluorocytidine
  modified_base 5: mod_base = um
  modified_base 6: mod_base = OTHER; note = 2'-fluoroguanosine
  modified_base 7: mod_base = gm
  modified_base 8: mod_base = OTHER; note = 2'-fluorocytidine
  modified_base 9: mod_base = um
  modified_base 10: mod_base = OTHER; note = 2'-fluorouridine
  modified_base 11: mod_base = cm
  modified_base 12: mod_base = OTHER; note = 2'-fluorocytidine
  modified_base 13: mod_base = cm
  modified_base 14: mod_base = OTHER; note = 2'-fluoroadenosine
  modified_base 15: mod_base = gm
  modified_base 16: mod_base = OTHER; note = 2'-fluoroguanosine
  modified_base 17: mod_base = OTHER; note = 2'-O-methyladenosine
  modified_base 18: mod_base = OTHER; note = 2'-fluoroadenosine
  modified_base 19: mod_base = um
  modified_base 20: mod_base = OTHER; note = 2'-fluorocytidine
  modified_base 20^21: mod_base = OTHER; note = phosphorothioate linkage
  modified_base 21: mod_base = um
  source 1..21: mol_type = other RNA
tttctggcttcccaggaatct

SEQ ID NO: 533 - RNA, 21 nt, synthetic construct
  modified_base 1: mod_base = um
  modified_base 1^2: mod_base = OTHER; note = phosphorothioate linkage
  modified_base 2: mod_base = OTHER; note = 2'-fluorouridine
  modified_base 2^3: mod_base = OTHER; note = phosphorothioate linkage
  modified_base 3: mod_base = gm
  modified_base 3^4: mod_base = OTHER; note = phosphorothioate linkage
  modified_base 4: mod_base = OTHER; note = 2'-fluoroadenosine
  modified_base 5: mod_base = gm
  modified_base 6: mod_base = OTHER; note = 2'-fluorouridine
  modified_base 7: mod_base = um
  modified_base 8: mod_base = OTHER; note = 2'-fluorocytidine
  modified_base 9: mod_base = OTHER; note = 2'-O-methyladenosine
  modified_base 10: mod_base = OTHER; note = 2'-fluoroguanosine
  modified_base 11: mod_base = OTHER; note = 2'-O-methyladenosine
  modified_base 12: mod_base = OTHER; note = 2'-fluoroguanosine
  modified_base 13: mod_base = gm
  modified_base 14: mod_base = OTHER; note = 2'-fluorocytidine
  modified_base 15: mod_base = OTHER; note = 2'-O-methyladenosine
  modified_base 16: mod_base = OTHER; note = 2'-fluoroguanosine
  modified_base 17: mod_base = OTHER; note = 2'-O-methyladenosine
  modified_base 18: mod_base = OTHER; note = 2'-fluoroadenosine
  modified_base 19: mod_base = um
  modified_base 20: mod_base = OTHER; note = 2'-fluorocytidine
  modified_base 20^21: mod_base = OTHER; note = phosphorothioate linkage
  modified_base 21: mod_base = um
  source 1..21: mol_type = other RNA
ttgagttcagaggcagaatct

SEQ ID NO: 534 - RNA, 21 nt, synthetic construct
  modified_base 1: mod_base = um
  modified_base 1^2: mod_base = OTHER; note = phosphorothioate linkage
  modified_base 2: mod_base = OTHER; note = 2'-fluorocytidine
  modified_base 2^3: mod_base = OTHER; note = phosphorothioate linkage
  modified_base 3: mod_base = um
  modified_base 3^4: mod_base = OTHER; note = phosphorothioate linkage
  modified_base 4: mod_base = OTHER; note = 2'-fluoroadenosine
  modified_base 5: mod_base = OTHER; note = 2'-O-methyladenosine
  modified_base 6: mod_base = OTHER; note = 2'-fluoroguanosine
  modified_base 7: mod_base = OTHER; note = 2'-O-methyladenosine
  modified_base 8: mod_base = OTHER; note = 2'-fluoroguanosine
  modified_base 9: mod_base = um
  modified_base 10: mod_base = OTHER; note = 2'-fluorocytidine
  modified_base 11: mod_base = cm
  modified_base 12: mod_base = OTHER; note = 2'-fluorocytidine
  modified_base 13: mod_base = um
  modified_base 14: mod_base = OTHER; note = 2'-fluoroguanosine
  modified_base 15: mod_base = cm
  modified_base 16: mod_base = OTHER; note = 2'-fluoroadenosine
  modified_base 17: mod_base = gm
  modified_base 18: mod_base = OTHER; note = 2'-fluoroguanosine
  modified_base 19: mod_base = gm
  modified_base 20: mod_base = OTHER; note = 2'-fluorouridine
  modified_base 20^21: mod_base = OTHER; note = phosphorothioate linkage
  modified_base 21: mod_base = OTHER; note = 2'-O-methyladenosine
  source 1..21: mol_type = other RNA
tctaagagtccctgcagggta

SEQ ID NO: 535 - RNA, 21 nt, synthetic construct
  modified_base 1: mod_base = OTHER; note = 2'-O-methyladenosine
  modified_base 1^2: mod_base = OTHER; note = phosphorothioate linkage
  modified_base 2: mod_base = OTHER; note = 2'-fluoroguanosine
  modified_base 2^3: mod_base = OTHER; note = phosphorothioate linkage
  modified_base 3: mod_base = cm
  modified_base 3^4: mod_base = OTHER; note = phosphorothioate linkage
  modified_base 4: mod_base = OTHER; note = 2'-fluorouridine
  modified_base 5: mod_base = OTHER; note = 2'-O-methyladenosine
  modified_base 6: mod_base = OTHER; note = 2'-fluoroadenosine
  modified_base 7: mod_base = gm
  modified_base 8: mod_base = OTHER; note = 2'-fluoroadenosine
  modified_base 9: mod_base = gm
  modified_base 10: mod_base = OTHER; note = 2'-fluorouridine
  modified_base 11: mod_base = cm
  modified_base 12: mod_base = OTHER; note = 2'-fluorocytidine
  modified_base 13: mod_base = cm
  modified_base 14: mod_base = OTHER; note = 2'-fluorouridine
  modified_base 15: mod_base = gm
  modified_base 16: mod_base = OTHER; note = 2'-fluorocytidine
  modified_base 17: mod_base = OTHER; note = 2'-O-methyladenosine
  modified_base 18: mod_base = OTHER; note = 2'-fluoroguanosine
  modified_base 19: mod_base = gm
  modified_base 20: mod_base = OTHER; note = 2'-fluoroguanosine
  modified_base 20^21: mod_base = OTHER; note = phosphorothioate linkage
  modified_base 21: mod_base = um
  source 1..21: mol_type = other RNA
agctaagagtccctgcagggt

SEQ ID NO: 536 - RNA, 21 nt, synthetic construct
  modified_base 1: mod_base = OTHER; note = 2'-O-methyladenosine
  modified_base 1^2: mod_base = OTHER; note = phosphorothioate linkage
  modified_base 2: mod_base = OTHER; note = 2'-fluoroadenosine
  modified_base 2^3: mod_base = OTHER; note = phosphorothioate linkage
  modified_base 3: mod_base = gm
  modified_base 3^4: mod_base = OTHER; note = phosphorothioate linkage
  modified_base 4: mod_base = OTHER; note = 2'-fluorocytidine
  modified_base 5: mod_base = um
  modified_base 6: mod_base = OTHER; note = 2'-fluoroadenosine
  modified_base 7: mod_base = cm
  modified_base 8: mod_base = OTHER; note = 2'-fluoroadenosine
  modified_base 9: mod_base = gm
  modified_base 10: mod_base = OTHER; note = 2'-fluoroguanosine
  modified_base 11: mod_base = OTHER; note = 2'-O-methyladenosine
  modified_base 12: mod_base = OTHER; note = 2'-fluoroguanosine
  modified_base 13: mod_base = OTHER; note = 2'-O-methyladenosine
  modified_base 14: mod_base = OTHER; note = 2'-fluoroadenosine
  modified_base 15: mod_base = gm
  modified_base 16: mod_base = OTHER; note = 2'-fluoroguanosine
  modified_base 17: mod_base = um
  modified_base 18: mod_base = OTHER; note = 2'-fluoroguanosine
  modified_base 19: mod_base = gm
  modified_base 20: mod_base = OTHER; note = 2'-fluoroguanosine
  modified_base 20^21: mod_base = OTHER; note = phosphorothioate linkage
  modified_base 21: mod_base = OTHER; note = 2'-O-methyladenosine
  source 1..21: mol_type = other RNA
aagctacaggagaaggtggga

SEQ ID NO: 537 - RNA, 21 nt, synthetic construct
  modified_base 1: mod_base = um
  modified_base 1^2: mod_base = OTHER; note = phosphorothioate linkage
  modified_base 2: mod_base = OTHER; note = 2'-fluorocytidine
  modified_base 2^3: mod_base = OTHER; note = phosphorothioate linkage
  modified_base 3: mod_base = um
  modified_base 3^4: mod_base = OTHER; note = phosphorothioate linkage
  modified_base 4: mod_base = OTHER; note = 2'-fluoroguanosine
  modified_base 5: mod_base = OTHER; note = 2'-O-methyladenosine
  modified_base 6: mod_base = OTHER; note = 2'-fluoroadenosine
  modified_base 7: mod_base = gm
  modified_base 8: mod_base = OTHER; note = 2'-fluorocytidine
  modified_base 9: mod_base = um
  modified_base 10: mod_base = OTHER; note = 2'-fluoroadenosine
  modified_base 11: mod_base = cm
  modified_base 12: mod_base = OTHER; note = 2'-fluoroadenosine
  modified_base 13: mod_base = gm
  modified_base 14: mod_base = OTHER; note = 2'-fluoroguanosine
  modified_base 15: mod_base = OTHER; note = 2'-O-methyladenosine
  modified_base 16: mod_base = OTHER; note = 2'-fluoroguanosine
  modified_base 17: mod_base = OTHER; note = 2'-O-methyladenosine
  modified_base 18: mod_base = OTHER; note = 2'-fluoroadenosine
  modified_base 19: mod_base = gm
  modified_base 20: mod_base = OTHER; note = 2'-fluoroguanosine
  modified_base 20^21: mod_base = OTHER; note = phosphorothioate linkage
  modified_base 21: mod_base = um
  source 1..21: mol_type = other RNA
tctgaagctacaggagaaggt

SEQ ID NO: 538 - RNA, 21 nt, synthetic construct
  modified_base 1: mod_base = um
  modified_base 1^2: mod_base = OTHER; note = phosphorothioate linkage
  modified_base 2: mod_base = OTHER; note = 2'-fluoroadenosine
  modified_base 2^3: mod_base = OTHER; note = phosphorothioate linkage
  modified_base 3: mod_base = cm
  modified_base 3^4: mod_base = OTHER; note = phosphorothioate linkage
  modified_base 4: mod_base = OTHER; note = 2'-fluoroadenosine
  modified_base 5: mod_base = gm
  modified_base 6: mod_base = OTHER; note = 2'-fluoroadenosine
  modified_base 7: mod_base = cm
  modified_base 8: mod_base = OTHER; note = 2'-fluorouridine
  modified_base 9: mod_base = gm
  modified_base 10: mod_base = OTHER; note = 2'-fluoroadenosine
  modified_base 11: mod_base = gm
  modified_base 12: mod_base = OTHER; note = 2'-fluoroguanosine
  modified_base 13: mod_base = OTHER; note = 2'-O-methyladenosine
  modified_base 14: mod_base = OTHER; note = 2'-fluorocytidine
  modified_base 15: mod_base = cm
  modified_base 16: mod_base = OTHER; note = 2'-fluoroadenosine
  modified_base 17: mod_base = gm
  modified_base 18: mod_base = OTHER; note = 2'-fluorocytidine
  modified_base 19: mod_base = OTHER; note = 2'-O-methyladenosine
  modified_base 20: mod_base = OTHER; note = 2'-fluorocytidine
  modified_base 20^21: mod_base = OTHER; note = phosphorothioate linkage
  modified_base 21: mod_base = cm
  source 1..21: mol_type = other RNA
tacagactgaggaccagcacc

SEQ ID NO: 539 - RNA, 21 nt, synthetic construct
  modified_base 1: mod_base = um
  modified_base 1^2: mod_base = OTHER; note = phosphorothioate linkage
  modified_base 2: mod_base = OTHER; note = 2'-fluoroadenosine
  modified_base 2^3: mod_base = OTHER; note = phosphorothioate linkage
  modified_base 3: mod_base = cm
  modified_base 3^4: mod_base = OTHER; note = phosphorothioate linkage
  modified_base 4: mod_base = OTHER; note = 2'-fluoroadenosine
  modified_base 5: mod_base = gm
  modified_base 6: mod_base = OTHER; note = 2'-fluoroadenosine
  modified_base 7: mod_base = OTHER; note = 2 ,3 -seco-cytidine
  modified_base 8: mod_base = OTHER; note = 2'-fluorouridine
  modified_base 9: mod_base = gm
  modified_base 10: mod_base = OTHER; note = 2'-fluoroadenosine
  modified_base 11: mod_base = gm
  modified_base 12: mod_base = OTHER; note = 2'-fluoroguanosine
  modified_base 13: mod_base = OTHER; note = 2'-O-methyladenosine
  modified_base 14: mod_base = OTHER; note = 2'-fluorocytidine
  modified_base 15: mod_base = cm
  modified_base 16: mod_base = OTHER; note = 2'-fluoroadenosine
  modified_base 17: mod_base = gm
  modified_base 18: mod_base = OTHER; note = 2'-fluorocytidine
  modified_base 19: mod_base = OTHER; note = 2'-O-methyladenosine
  modified_base 20: mod_base = OTHER; note = 2'-fluorocytidine
  modified_base 20^21: mod_base = OTHER; note = phosphorothioate linkage
  modified_base 21: mod_base = cm
  source 1..21: mol_type = other RNA
tacagactgaggaccagcacc

SEQ ID NO: 540 - RNA, 21 nt, synthetic construct
  modified_base 1: mod_base = um
  modified_base 1^2: mod_base = OTHER; note = phosphorothioate linkage
  modified_base 2: mod_base = OTHER; note = 2'-fluorocytidine
  modified_base 2^3: mod_base = OTHER; note = phosphorothioate linkage
  modified_base 3: mod_base = OTHER; note = 2'-O-methyladenosine
  modified_base 3^4: mod_base = OTHER; note = phosphorothioate linkage
  modified_base 4: mod_base = OTHER; note = 2'-fluorocytidine
  modified_base 5: mod_base = OTHER; note = 2'-O-methyladenosine
  modified_base 6: mod_base = OTHER; note = 2'-fluoroguanosine
  modified_base 7: mod_base = OTHER; note = 2'-O-methyladenosine
  modified_base 8: mod_base = OTHER; note = 2'-fluorocytidine
  modified_base 9: mod_base = um
  modified_base 10: mod_base = OTHER; note = 2'-fluoroguanosine
  modified_base 11: mod_base = OTHER; note = 2'-O-methyladenosine
  modified_base 12: mod_base = OTHER; note = 2'-fluoroguanosine
  modified_base 13: mod_base = gm
  modified_base 14: mod_base = OTHER; note = 2'-fluoroadenosine
  modified_base 15: mod_base = cm
  modified_base 16: mod_base = OTHER; note = 2'-fluorocytidine
  modified_base 17: mod_base = OTHER; note = 2'-O-methyladenosine
  modified_base 18: mod_base = OTHER; note = 2'-fluoroguanosine
  modified_base 19: mod_base = cm
  modified_base 20: mod_base = OTHER; note = 2'-fluoroadenosine
  modified_base 20^21: mod_base = OTHER; note = phosphorothioate linkage
  modified_base 21: mod_base = cm
  source 1..21: mol_type = other RNA
tcacagactgaggaccagcac

SEQ ID NO: 541 - RNA, 21 nt, synthetic construct
  modified_base 1: mod_base = um
  modified_base 1^2: mod_base = OTHER; note = phosphorothioate linkage
  modified_base 2: mod_base = OTHER; note = 2'-fluorouridine
  modified_base 2^3: mod_base = OTHER; note = phosphorothioate linkage
  modified_base 3: mod_base = gm
  modified_base 3^4: mod_base = OTHER; note = phosphorothioate linkage
  modified_base 4: mod_base = OTHER; note = 2'-fluorouridine
  modified_base 5: mod_base = gm
  modified_base 6: mod_base = OTHER; note = 2'-fluorouridine
  modified_base 7: mod_base = um
  modified_base 8: mod_base = OTHER; note = 2'-fluorocytidine
  modified_base 9: mod_base = OTHER; note = 2'-O-methyladenosine
  modified_base 10: mod_base = OTHER; note = 2'-fluoroguanosine
  modified_base 11: mod_base = um
  modified_base 12: mod_base = OTHER; note = 2'-fluorouridine
  modified_base 13: mod_base = um
  modified_base 14: mod_base = OTHER; note = 2'-fluorocytidine
  modified_base 15: mod_base = cm
  modified_base 16: mod_base = OTHER; note = 2'-fluoroadenosine
  modified_base 17: mod_base = um
  modified_base 18: mod_base = OTHER; note = 2'-fluorouridine
  modified_base 19: mod_base = cm
  modified_base 20: mod_base = OTHER; note = 2'-fluorocytidine
  modified_base 20^21: mod_base = OTHER; note = phosphorothioate linkage
  modified_base 21: mod_base = cm
  source 1..21: mol_type = other RNA
ttgtgttcagtttccattccc

SEQ ID NO: 542 - RNA, 21 nt, synthetic construct
  modified_base 1: mod_base = um
  modified_base 1^2: mod_base = OTHER; note = phosphorothioate linkage
  modified_base 2: mod_base = OTHER; note = 2'-fluorouridine
  modified_base 2^3: mod_base = OTHER; note = phosphorothioate linkage
  modified_base 3: mod_base = gm
  modified_base 3^4: mod_base = OTHER; note = phosphorothioate linkage
  modified_base 4: mod_base = OTHER; note = 2'-fluorouridine
  modified_base 5: mod_base = gm
  modified_base 6: mod_base = OTHER; note = 2'-fluorouridine
  modified_base 7: mod_base = OTHER; note = 2 ,3 -seco-uridine
  modified_base 8: mod_base = OTHER; note = 2'-fluorocytidine
  modified_base 9: mod_base = OTHER; note = 2'-O-methyladenosine
  modified_base 10: mod_base = OTHER; note = 2'-fluoroguanosine
  modified_base 11: mod_base = um
  modified_base 12: mod_base = OTHER; note = 2'-fluorouridine
  modified_base 13: mod_base = um
  modified_base 14: mod_base = OTHER; note = 2'-fluorocytidine
  modified_base 15: mod_base = cm
  modified_base 16: mod_base = OTHER; note = 2'-fluoroadenosine
  modified_base 17: mod_base = um
  modified_base 18: mod_base = OTHER; note = 2'-fluorouridine
  modified_base 19: mod_base = cm
  modified_base 20: mod_base = OTHER; note = 2'-fluorocytidine
  modified_base 20^21: mod_base = OTHER; note = phosphorothioate linkage
  modified_base 21: mod_base = gm
  source 1..21: mol_type = other RNA
ttgtgttcagtttccattccg

SEQ ID NO: 543 - RNA, 21 nt, synthetic construct
  modified_base 1: mod_base = um
  modified_base 1^2: mod_base = OTHER; note = phosphorothioate linkage
  modified_base 2: mod_base = OTHER; note = 2'-fluorouridine
  modified_base 2^3: mod_base = OTHER; note = phosphorothioate linkage
  modified_base 3: mod_base = gm
  modified_base 3^4: mod_base = OTHER; note = phosphorothioate linkage
  modified_base 4: mod_base = OTHER; note = 2'-fluorouridine
  modified_base 5: mod_base = gm
  modified_base 6: mod_base = OTHER; note = 2'-fluorouridine
  modified_base 7: mod_base = um
  modified_base 8: mod_base = cm
  modified_base 9: mod_base = OTHER; note = 2'-O-methyladenosine
  modified_base 10: mod_base = gm
  modified_base 11: mod_base = um
  modified_base 12: mod_base = OTHER; note = 2'-fluorouridine
  modified_base 13: mod_base = um
  modified_base 14: mod_base = OTHER; note = 2'-fluorocytidine
  modified_base 15: mod_base = cm
  modified_base 16: mod_base = OTHER; note = 2'-fluoroadenosine
  modified_base 17: mod_base = um
  modified_base 18: mod_base = OTHER; note = 2'-fluorouridine
  modified_base 19: mod_base = cm
  modified_base 20: mod_base = OTHER; note = 2'-fluorocytidine
  modified_base 20^21: mod_base = OTHER; note = phosphorothioate linkage
  modified_base 21: mod_base = gm
  source 1..21: mol_type = other RNA
ttgtgttcagtttccattccg

SEQ ID NO: 544 - RNA, 21 nt, synthetic construct
  modified_base 1: mod_base = um
  modified_base 1^2: mod_base = OTHER; note = phosphorothioate linkage
  modified_base 2: mod_base = OTHER; note = 2'-fluorouridine
  modified_base 2^3: mod_base = OTHER; note = phosphorothioate linkage
  modified_base 3: mod_base = gm
  modified_base 3^4: mod_base = OTHER; note = phosphorothioate linkage
  modified_base 4: mod_base = um
  modified_base 5: mod_base = gm
  modified_base 6: mod_base = um
  modified_base 7: mod_base = um
  modified_base 8: mod_base = cm
  modified_base 9: mod_base = OTHER; note = 2'-O-methyladenosine
  modified_base 10: mod_base = gm
  modified_base 11: mod_base = um
  modified_base 12: mod_base = OTHER; note = 2'-fluorouridine
  modified_base 13: mod_base = um
  modified_base 14: mod_base = OTHER; note = 2'-fluorocytidine
  modified_base 15: mod_base = cm
  modified_base 16: mod_base = OTHER; note = 2'-fluoroadenosine
  modified_base 17: mod_base = um
  modified_base 18: mod_base = um
  modified_base 19: mod_base = cm
  modified_base 20: mod_base = cm
  modified_base 20^21: mod_base = OTHER; note = phosphorothioate linkage
  modified_base 21: mod_base = gm
  source 1..21: mol_type = other RNA
ttgtgttcagtttccattccg

SEQ ID NO: 545 - RNA, 21 nt, synthetic construct
  modified_base 1: mod_base = um
  modified_base 1^2: mod_base = OTHER; note = phosphorothioate linkage
  modified_base 2: mod_base = OTHER; note = 2'-fluorouridine
  modified_base 2^3: mod_base = OTHER; note = phosphorothioate linkage
  modified_base 3: mod_base = gm
  modified_base 3^4: mod_base = OTHER; note = phosphorothioate linkage
  modified_base 4: mod_base = um
  modified_base 5: mod_base = gm
  modified_base 6: mod_base = um
  modified_base 7: mod_base = um
  modified_base 8: mod_base = cm
  modified_base 9: mod_base = OTHER; note = 2'-O-methyladenosine
  modified_base 10: mod_base = OTHER; note = 2'-fluoroguanosine
  modified_base 11: mod_base = um
  modified_base 12: mod_base = OTHER; note = 2'-fluorouridine
  modified_base 13: mod_base = um
  modified_base 14: mod_base = OTHER; note = 2'-fluorocytidine
  modified_base 15: mod_base = cm
  modified_base 16: mod_base = OTHER; note = 2'-fluoroadenosine
  modified_base 17: mod_base = um
  modified_base 18: mod_base = um
  modified_base 19: mod_base = cm
  modified_base 20: mod_base = cm
  modified_base 20^21: mod_base = OTHER; note = phosphorothioate linkage
  modified_base 21: mod_base = gm
  source 1..21: mol_type = other RNA
ttgtgttcagtttccattccg

SEQ ID NO: 546 - RNA, 21 nt, synthetic construct
  modified_base 1: mod_base = um
  modified_base 1^2: mod_base = OTHER; note = phosphorothioate linkage
  modified_base 2: mod_base = OTHER; note = 2'-fluoroguanosine
  modified_base 2^3: mod_base = OTHER; note = phosphorothioate linkage
  modified_base 3: mod_base = OTHER; note = 2'-O-methyladenosine
  modified_base 3^4: mod_base = OTHER; note = phosphorothioate linkage
  modified_base 4: mod_base = OTHER; note = 2'-fluorouridine
  modified_base 5: mod_base = gm
  modified_base 6: mod_base = OTHER; note = 2'-fluorouridine
  modified_base 7: mod_base = um
  modified_base 8: mod_base = OTHER; note = 2'-fluorouridine
  modified_base 9: mod_base = um
  modified_base 10: mod_base = OTHER; note = 2'-fluoroguanosine
  modified_base 11: mod_base = OTHER; note = 2'-O-methyladenosine
  modified_base 12: mod_base = OTHER; note = 2'-fluoroguanosine
  modified_base 13: mod_base = cm
  modified_base 14: mod_base = OTHER; note = 2'-fluoroadenosine
  modified_base 15: mod_base = cm
  modified_base 16: mod_base = OTHER; note = 2'-fluorocytidine
  modified_base 17: mod_base = um
  modified_base 18: mod_base = OTHER; note = 2'-fluoroadenosine
  modified_base 19: mod_base = cm
  modified_base 20: mod_base = OTHER; note = 2'-fluorouridine
  modified_base 20^21: mod_base = OTHER; note = phosphorothioate linkage
  modified_base 21: mod_base = cm
  source 1..21: mol_type = other RNA
tgatgttttgagcacctactc

SEQ ID NO: 547 - RNA, 21 nt, synthetic construct
  modified_base 1: mod_base = um
  modified_base 1^2: mod_base = OTHER; note = phosphorothioate linkage
  modified_base 2: mod_base = OTHER; note = 2'-fluorouridine
  modified_base 2^3: mod_base = OTHER; note = phosphorothioate linkage
  modified_base 3: mod_base = cm
  modified_base 3^4: mod_base = OTHER; note = phosphorothioate linkage
  modified_base 4: mod_base = OTHER; note = 2'-fluorocytidine
  modified_base 5: mod_base = OTHER; note = 2'-O-methyladenosine
  modified_base 6: mod_base = OTHER; note = 2'-fluorouridine
  modified_base 7: mod_base = um
  modified_base 8: mod_base = OTHER; note = 2'-fluorocytidine
  modified_base 9: mod_base = cm
  modified_base 10: mod_base = OTHER; note = 2'-fluorouridine
  modified_base 11: mod_base = gm
  modified_base 12: mod_base = OTHER; note = 2'-fluorouridine
  modified_base 13: mod_base = um
  modified_base 14: mod_base = OTHER; note = 2'-fluorocytidine
  modified_base 15: mod_base = OTHER; note = 2'-O-methyladenosine
  modified_base 16: mod_base = OTHER; note = 2'-fluorouridine
  modified_base 17: mod_base = um
  modified_base 18: mod_base = OTHER; note = 2'-fluoroguanosine
  modified_base 19: mod_base = cm
  modified_base 20: mod_base = OTHER; note = 2'-fluorocytidine
  modified_base 20^21: mod_base = OTHER; note = phosphorothioate linkage
  modified_base 21: mod_base = um
  source 1..21: mol_type = other RNA
ttccattcctgttcattgcct

SEQ ID NO: 548 - RNA, 21 nt, synthetic construct
  modified_base 1: mod_base = um
  modified_base 1^2: mod_base = OTHER; note = phosphorothioate linkage
  modified_base 2: mod_base = OTHER; note = 2'-fluoroguanosine
  modified_base 2^3: mod_base = OTHER; note = phosphorothioate linkage
  modified_base 3: mod_base = OTHER; note = 2'-O-methyladenosine
  modified_base 3^4: mod_base = OTHER; note = phosphorothioate linkage
  modified_base 4: mod_base = OTHER; note = 2'-fluoroadenosine
  modified_base 5: mod_base = um
  modified_base 6: mod_base = OTHER; note = 2'-fluorocytidine
  modified_base 7: mod_base = um
  modified_base 8: mod_base = OTHER; note = 2'-fluoroguanosine
  modified_base 9: mod_base = gm
  modified_base 10: mod_base = OTHER; note = 2'-fluorouridine
  modified_base 11: mod_base = OTHER; note = 2'-O-methyladenosine
  modified_base 12: mod_base = OTHER; note = 2'-fluoroguanosine
  modified_base 13: mod_base = OTHER; note = 2'-O-methyladenosine
  modified_base 14: mod_base = OTHER; note = 2'-fluorocytidine
  modified_base 15: mod_base = OTHER; note = 2'-O-methyladenosine
  modified_base 16: mod_base = OTHER; note = 2'-fluorocytidine
  modified_base 17: mod_base = gm
  modified_base 18: mod_base = OTHER; note = 2'-fluoroguanosine
  modified_base 19: mod_base = OTHER; note = 2'-O-methyladenosine
  modified_base 20: mod_base = OTHER; note = 2'-fluorocytidine
  modified_base 20^21: mod_base = OTHER; note = phosphorothioate linkage
  modified_base 21: mod_base = um
  source 1..21: mol_type = other RNA
tgaatctggtagacacggact

SEQ ID NO: 549 - RNA, 21 nt, synthetic construct
  modified_base 1: mod_base = um
  modified_base 1^2: mod_base = OTHER; note = phosphorothioate linkage
  modified_base 2: mod_base = OTHER; note = 2'-fluoroadenosine
  modified_base 2^3: mod_base = OTHER; note = phosphorothioate linkage
  modified_base 3: mod_base = gm
  modified_base 3^4: mod_base = OTHER; note = phosphorothioate linkage
  modified_base 4: mod_base = OTHER; note = 2'-fluoroguanosine
  modified_base 5: mod_base = OTHER; note = 2'-O-methyladenosine
  modified_base 6: mod_base = OTHER; note = 2'-fluoroadenosine
  modified_base 7: mod_base = um
  modified_base 8: mod_base = OTHER; note = 2'-fluorocytidine
  modified_base 9: mod_base = um
  modified_base 10: mod_base = OTHER; note = 2'-fluoroguanosine
  modified_base 11: mod_base = gm
  modified_base 12: mod_base = OTHER; note = 2'-fluorouridine
  modified_base 13: mod_base = OTHER; note = 2'-O-methyladenosine
  modified_base 14: mod_base = OTHER; note = 2'-fluoroguanosine
  modified_base 15: mod_base = OTHER; note = 2'-O-methyladenosine
  modified_base 16: mod_base = OTHER; note = 2'-fluorocytidine
  modified_base 17: mod_base = OTHER; note = 2'-O-methyladenosine
  modified_base 18: mod_base = OTHER; note = 2'-fluorocytidine
  modified_base 19: mod_base = gm
  modified_base 20: mod_base = OTHER; note = 2'-fluoroguanosine
  modified_base 20^21: mod_base = OTHER; note = phosphorothioate linkage
  modified_base 21: mod_base = OTHER; note = 2'-O-methyladenosine
  source 1..21: mol_type = other RNA
taggaatctggtagacacgga

SEQ ID NO: 550 - RNA, 21 nt, synthetic construct
  modified_base 1: mod_base = um
  modified_base 1^2: mod_base = OTHER; note = phosphorothioate linkage
  modified_base 2: mod_base = OTHER; note = 2'-fluoroadenosine
  modified_base 2^3: mod_base = OTHER; note = phosphorothioate linkage
  modified_base 3: mod_base = OTHER; note = 2'-O-methyladenosine
  modified_base 3^4: mod_base = OTHER; note = phosphorothioate linkage
  modified_base 4: mod_base = OTHER; note = 2'-fluoroguanosine
  modified_base 5: mod_base = cm
  modified_base 6: mod_base = OTHER; note = 2'-fluorouridine
  modified_base 7: mod_base = OTHER; note = 2'-O-methyladenosine
  modified_base 8: mod_base = OTHER; note = 2'-fluorocytidine
  modified_base 9: mod_base = OTHER; note = 2'-O-methyladenosine
  modified_base 10: mod_base = OTHER; note = 2'-fluoroguanosine
  modified_base 11: mod_base = gm
  modified_base 12: mod_base = OTHER; note = 2'-fluoroadenosine
  modified_base 13: mod_base = gm
  modified_base 14: mod_base = OTHER; note = 2'-fluoroadenosine
  modified_base 15: mod_base = OTHER; note = 2'-O-methyladenosine
  modified_base 16: mod_base = OTHER; note = 2'-fluoroguanosine
  modified_base 17: mod_base = gm
  modified_base 18: mod_base = OTHER; note = 2'-fluorouridine
  modified_base 19: mod_base = gm
  modified_base 20: mod_base = OTHER; note = 2'-fluoroguanosine
  modified_base 20^21: mod_base = OTHER; note = phosphorothioate linkage
  modified_base 21: mod_base = gm
  source 1..21: mol_type = other RNA
taagctacaggagaaggtggg

SEQ ID NO: 551 - RNA, 21 nt, synthetic construct
  modified_base 1: mod_base = um
  modified_base 1^2: mod_base = OTHER; note = phosphorothioate linkage
  modified_base 2: mod_base = OTHER; note = 2'-fluorocytidine
  modified_base 2^3: mod_base = OTHER; note = phosphorothioate linkage
  modified_base 3: mod_base = OTHER; note = 2'-O-methyladenosine
  modified_base 3^4: mod_base = OTHER; note = phosphorothioate linkage
  modified_base 4: mod_base = OTHER; note = 2'-fluorouridine
  modified_base 5: mod_base = cm
  modified_base 6: mod_base = OTHER; note = 2'-fluorocytidine
  modified_base 7: mod_base = OTHER; note = 2'-O-methyladenosine
  modified_base 8: mod_base = OTHER; note = 2'-fluoroguanosine
  modified_base 9: mod_base = um
  modified_base 10: mod_base = OTHER; note = 2'-fluoroguanosine
  modified_base 11: mod_base = gm
  modified_base 12: mod_base = OTHER; note = 2'-fluoroadenosine
  modified_base 13: mod_base = um
  modified_base 14: mod_base = OTHER; note = 2'-fluorouridine
  modified_base 15: mod_base = um
  modified_base 16: mod_base = OTHER; note = 2'-fluoroguanosine
  modified_base 17: mod_base = OTHER; note = 2'-O-methyladenosine
  modified_base 18: mod_base = OTHER; note = 2'-fluoroguanosine
  modified_base 19: mod_base = gm
  modified_base 20: mod_base = OTHER; note = 2'-fluoroadenosine
  modified_base 20^21: mod_base = OTHER; note = phosphorothioate linkage
  modified_base 21: mod_base = gm
  source 1..21: mol_type = other RNA
tcatccagtggatttgaggag

SEQ ID NO: 552 - RNA, 21 nt, synthetic construct
  modified_base 1: mod_base = OTHER; note = 2'-O-methyladenosine
  modified_base 1^2: mod_base = OTHER; note = phosphorothioate linkage
  modified_base 2: mod_base = OTHER; note = 2'-fluoroguanosine
  modified_base 2^3: mod_base = OTHER; note = phosphorothioate linkage
  modified_base 3: mod_base = um
  modified_base 3^4: mod_base = OTHER; note = phosphorothioate linkage
  modified_base 4: mod_base = OTHER; note = 2'-fluorouridine
  modified_base 5: mod_base = cm
  modified_base 6: mod_base = OTHER; note = 2'-fluoroadenosine
  modified_base 7: mod_base = gm
  modified_base 8: mod_base = OTHER; note = 2'-fluoroadenosine
  modified_base 9: mod_base = gm
  modified_base 10: mod_base = OTHER; note = 2'-fluoroguanosine
  modified_base 11: mod_base = cm
  modified_base 12: mod_base = OTHER; note = 2'-fluoroadenosine
  modified_base 13: mod_base = gm
  modified_base 14: mod_base = OTHER; note = 2'-fluoroadenosine
  modified_base 15: mod_base = OTHER; note = 2'-O-methyladenosine
  modified_base 16: mod_base = OTHER; note = 2'-fluorouridine
  modified_base 17: mod_base = cm
  modified_base 18: mod_base = OTHER; note = 2'-fluorouridine
  modified_base 19: mod_base = OTHER; note = 2'-O-methyladenosine
  modified_base 20: mod_base = OTHER; note = 2'-fluorocytidine
  modified_base 20^21: mod_base = OTHER; note = phosphorothioate linkage
  modified_base 21: mod_base = cm
  source 1..21: mol_type = other RNA
agttcagaggcagaatctacc

SEQ ID NO: 553 - RNA, 21 nt, synthetic construct
  modified_base 1: mod_base = um
  modified_base 1^2: mod_base = OTHER; note = phosphorothioate linkage
  modified_base 2: mod_base = OTHER; note = 2'-fluoroguanosine
  modified_base 2^3: mod_base = OTHER; note = phosphorothioate linkage
  modified_base 3: mod_base = OTHER; note = 2'-O-methyladenosine
  modified_base 3^4: mod_base = OTHER; note = phosphorothioate linkage
  modified_base 4: mod_base = OTHER; note = 2'-fluoroguanosine
  modified_base 5: mod_base = um
  modified_base 6: mod_base = OTHER; note = 2'-fluorouridine
  modified_base 7: mod_base = OTHER; note = 2 ,3 -seco-cytidine
  modified_base 8: mod_base = OTHER; note = 2'-fluoroadenosine
  modified_base 9: mod_base = gm
  modified_base 10: mod_base = OTHER; note = 2'-fluoroadenosine
  modified_base 11: mod_base = gm
  modified_base 12: mod_base = OTHER; note = 2'-fluoroguanosine
  modified_base 13: mod_base = cm
  modified_base 14: mod_base = OTHER; note = 2'-fluoroadenosine
  modified_base 15: mod_base = gm
  modified_base 16: mod_base = OTHER; note = 2'-fluoroadenosine
  modified_base 17: mod_base = OTHER; note = 2'-O-methyladenosine
  modified_base 18: mod_base = OTHER; note = 2'-fluorouridine
  modified_base 19: mod_base = cm
  modified_base 20: mod_base = OTHER; note = 2'-fluorouridine
  modified_base 20^21: mod_base = OTHER; note = phosphorothioate linkage
  modified_base 21: mod_base = OTHER; note = 2'-O-methyladenosine
  source 1..21: mol_type = other RNA
tgagttcagaggcagaatcta

SEQ ID NO: 554 - RNA, 21 nt, synthetic construct
  modified_base 1: mod_base = OTHER; note = 2'-O-methyladenosine
  modified_base 1^2: mod_base = OTHER; note = phosphorothioate linkage
  modified_base 2: mod_base = OTHER; note = 2'-fluorocytidine
  modified_base 2^3: mod_base = OTHER; note = phosphorothioate linkage
  modified_base 3: mod_base = cm
  modified_base 3^4: mod_base = OTHER; note = phosphorothioate linkage
  modified_base 4: mod_base = OTHER; note = 2'-fluorouridine
  modified_base 5: mod_base = um
  modified_base 6: mod_base = OTHER; note = 2'-fluoroadenosine
  modified_base 7: mod_base = um
  modified_base 8: mod_base = OTHER; note = 2'-fluorouridine
  modified_base 9: mod_base = gm
  modified_base 10: mod_base = OTHER; note = 2'-fluoroguanosine
  modified_base 11: mod_base = gm
  modified_base 12: mod_base = OTHER; note = 2'-fluoroadenosine
  modified_base 13: mod_base = OTHER; note = 2'-O-methyladenosine
  modified_base 14: mod_base = OTHER; note = 2'-fluorocytidine
  modified_base 15: mod_base = OTHER; note = 2'-O-methyladenosine
  modified_base 16: mod_base = OTHER; note = 2'-fluorocytidine
  modified_base 17: mod_base = cm
  modified_base 18: mod_base = OTHER; note = 2'-fluoroadenosine
  modified_base 19: mod_base = gm
  modified_base 20: mod_base = OTHER; note = 2'-fluorocytidine
  modified_base 20^21: mod_base = OTHER; note = phosphorothioate linkage
  modified_base 21: mod_base = cm
  source 1..21: mol_type = other RNA
accttattgggaacaccagcc

SEQ ID NO: 555 - RNA, 21 nt, synthetic construct
  modified_base 1: mod_base = um
  modified_base 1^2: mod_base = OTHER; note = phosphorothioate linkage
  modified_base 2: mod_base = OTHER; note = 2'-fluorocytidine
  modified_base 2^3: mod_base = OTHER; note = phosphorothioate linkage
  modified_base 3: mod_base = OTHER; note = 2'-O-methyladenosine
  modified_base 3^4: mod_base = OTHER; note = phosphorothioate linkage
  modified_base 4: mod_base = OTHER; note = 2'-fluorocytidine
  modified_base 5: mod_base = cm
  modified_base 6: mod_base = OTHER; note = 2'-fluorouridine
  modified_base 7: mod_base = um
  modified_base 8: mod_base = OTHER; note = 2'-fluoroadenosine
  modified_base 9: mod_base = um
  modified_base 10: mod_base = OTHER; note = 2'-fluorouridine
  modified_base 11: mod_base = gm
  modified_base 12: mod_base = OTHER; note = 2'-fluoroguanosine
  modified_base 13: mod_base = gm
  modified_base 14: mod_base = OTHER; note = 2'-fluoroadenosine
  modified_base 15: mod_base = OTHER; note = 2'-O-methyladenosine
  modified_base 16: mod_base = OTHER; note = 2'-fluorocytidine
  modified_base 17: mod_base = OTHER; note = 2'-O-methyladenosine
  modified_base 18: mod_base = OTHER; note = 2'-fluorocytidine
  modified_base 19: mod_base = cm
  modified_base 20: mod_base = OTHER; note = 2'-fluoroadenosine
  modified_base 20^21: mod_base = OTHER; note = phosphorothioate linkage
  modified_base 21: mod_base = gm
  source 1..21: mol_type = other RNA
tcaccttattgggaacaccag

SEQ ID NO: 556 - RNA, 21 nt, synthetic construct
  modified_base 1: mod_base = um
  modified_base 1^2: mod_base = OTHER; note = phosphorothioate linkage
  modified_base 2: mod_base = OTHER; note = 2'-fluorocytidine
  modified_base 2^3: mod_base = OTHER; note = phosphorothioate linkage
  modified_base 3: mod_base = OTHER; note = 2'-O-methyladenosine
  modified_base 3^4: mod_base = OTHER; note = phosphorothioate linkage
  modified_base 4: mod_base = OTHER; note = 2'-fluorouridine
  modified_base 5: mod_base = cm
  modified_base 6: mod_base = OTHER; note = 2'-fluorocytidine
  modified_base 7: mod_base = OTHER; note = 2'-O-methyladenosine
  modified_base 8: mod_base = OTHER; note = 2'-fluoroadenosine
  modified_base 9: mod_base = gm
  modified_base 10: mod_base = OTHER; note = 2'-fluorouridine
  modified_base 11: mod_base = gm
  modified_base 12: mod_base = OTHER; note = 2'-fluorocytidine
  modified_base 13: mod_base = cm
  modified_base 14: mod_base = OTHER; note = 2'-fluoroadenosine
  modified_base 15: mod_base = gm
  modified_base 16: mod_base = OTHER; note = 2'-fluorocytidine
  modified_base 17: mod_base = um
  modified_base 18: mod_base = OTHER; note = 2'-fluoroadenosine
  modified_base 19: mod_base = OTHER; note = 2'-O-methyladenosine
  modified_base 20: mod_base = OTHER; note = 2'-fluoroguanosine
  modified_base 20^21: mod_base = OTHER; note = phosphorothioate linkage
  modified_base 21: mod_base = cm
  source 1..21: mol_type = other RNA
tcatccaagtgccagctaagc

SEQ ID NO: 557 - RNA, 21 nt, synthetic construct
  modified_base 1: mod_base = OTHER; note = 2'-O-methyladenosine
  modified_base 1^2: mod_base = OTHER; note = phosphorothioate linkage
  modified_base 2: mod_base = OTHER; note = 2'-fluoroguanosine
  modified_base 2^3: mod_base = OTHER; note = phosphorothioate linkage
  modified_base 3: mod_base = OTHER; note = 2'-O-methyladenosine
  modified_base 3^4: mod_base = OTHER; note = phosphorothioate linkage
  modified_base 4: mod_base = OTHER; note = 2'-fluorouridine
  modified_base 5: mod_base = OTHER; note = 2'-O-methyladenosine
  modified_base 6: mod_base = OTHER; note = 2'-fluorocytidine
  modified_base 7: mod_base = um
  modified_base 8: mod_base = OTHER; note = 2'-fluorocytidine
  modified_base 9: mod_base = cm
  modified_base 10: mod_base = OTHER; note = 2'-fluorocytidine
  modified_base 11: mod_base = um
  modified_base 12: mod_base = OTHER; note = 2'-fluorouridine
  modified_base 13: mod_base = cm
  modified_base 14: mod_base = OTHER; note = 2'-fluorouridine
  modified_base 15: mod_base = cm
  modified_base 16: mod_base = OTHER; note = 2'-fluoroadenosine
  modified_base 17: mod_base = um
  modified_base 18: mod_base = OTHER; note = 2'-fluorouridine
  modified_base 19: mod_base = OTHER; note = 2'-O-methyladenosine
  modified_base 20: mod_base = OTHER; note = 2'-fluoroguanosine
  modified_base 20^21: mod_base = OTHER; note = phosphorothioate linkage
  modified_base 21: mod_base = gm
  source 1..21: mol_type = other RNA
agatactcccttctcattagg

SEQ ID NO: 558 - RNA, 21 nt, synthetic construct
  modified_base 1: mod_base = um
  modified_base 1^2: mod_base = OTHER; note = phosphorothioate linkage
  modified_base 2: mod_base = OTHER; note = 2'-fluorocytidine
  modified_base 2^3: mod_base = OTHER; note = phosphorothioate linkage
  modified_base 3: mod_base = OTHER; note = 2'-O-methyladenosine
  modified_base 3^4: mod_base = OTHER; note = phosphorothioate linkage
  modified_base 4: mod_base = OTHER; note = 2'-fluorocytidine
  modified_base 5: mod_base = OTHER; note = 2'-O-methyladenosine
  modified_base 6: mod_base = OTHER; note = 2'-fluoroguanosine
  modified_base 7: mod_base = OTHER; note = 2'-O-methyladenosine
  modified_base 8: mod_base = OTHER; note = 2'-fluorouridine
  modified_base 9: mod_base = OTHER; note = 2'-O-methyladenosine
  modified_base 10: mod_base = OTHER; note = 2'-fluorocytidine
  modified_base 11: mod_base = um
  modified_base 12: mod_base = OTHER; note = 2'-fluorocytidine
  modified_base 13: mod_base = cm
  modified_base 14: mod_base = OTHER; note = 2'-fluorocytidine
  modified_base 15: mod_base = um
  modified_base 16: mod_base = OTHER; note = 2'-fluorouridine
  modified_base 17: mod_base = cm
  modified_base 18: mod_base = OTHER; note = 2'-fluorouridine
  modified_base 19: mod_base = cm
  modified_base 20: mod_base = OTHER; note = 2'-fluoroadenosine
  modified_base 20^21: mod_base = OTHER; note = phosphorothioate linkage
  modified_base 21: mod_base = cm
  source 1..21: mol_type = other RNA
tcacagatactcccttctcac

SEQ ID NO: 559 - RNA, 21 nt, synthetic construct
  modified_base 1: mod_base = um
  modified_base 1^2: mod_base = OTHER; note = phosphorothioate linkage
  modified_base 2: mod_base = OTHER; note = 2'-fluoroguanosine
  modified_base 2^3: mod_base = OTHER; note = phosphorothioate linkage
  modified_base 3: mod_base = um
  modified_base 3^4: mod_base = OTHER; note = phosphorothioate linkage
  modified_base 4: mod_base = OTHER; note = 2'-fluorouridine
  modified_base 5: mod_base = cm
  modified_base 6: mod_base = OTHER; note = 2'-fluoroguanosine
  modified_base 7: mod_base = OTHER; note = 2'-O-methyladenosine
  modified_base 8: mod_base = OTHER; note = 2'-fluorouridine
  modified_base 9: mod_base = gm
  modified_base 10: mod_base = OTHER; note = 2'-fluoroadenosine
  modified_base 11: mod_base = um
  modified_base 12: mod_base = OTHER; note = 2'-fluoroguanosine
  modified_base 13: mod_base = cm
  modified_base 14: mod_base = OTHER; note = 2'-fluorouridine
  modified_base 15: mod_base = gm
  modified_base 16: mod_base = OTHER; note = 2'-fluoroadenosine
  modified_base 17: mod_base = um
  modified_base 18: mod_base = OTHER; note = 2'-fluoroguanosine
  modified_base 19: mod_base = cm
  modified_base 20: mod_base = OTHER; note = 2'-fluorouridine
  modified_base 20^21: mod_base = OTHER; note = phosphorothioate linkage
  modified_base 21: mod_base = gm
  source 1..21: mol_type = other RNA
tgttcgatgatgctgatgctg

SEQ ID NO: 560 - RNA, 21 nt, synthetic construct
  modified_base 1: mod_base = OTHER; note = 5 -cyclopropyl phosphonate-2 -O-methyluridine
  modified_base 1^2: mod_base = OTHER; note = phosphorothioate linkage
  modified_base 2: mod_base = OTHER; note = 2'-fluorouridine
  modified_base 3: mod_base = gm
  modified_base 4: mod_base = OTHER; note = 2'-fluorouridine
  modified_base 5: mod_base = gm
  modified_base 6: mod_base = OTHER; note = 2'-fluorouridine
  modified_base 7: mod_base = um
  modified_base 8: mod_base = OTHER; note = 2'-fluorocytidine
  modified_base 9: mod_base = OTHER; note = 2'-O-methyladenosine
  modified_base 10: mod_base = OTHER; note = 2'-fluoroguanosine
  modified_base 11: mod_base = um
  modified_base 12: mod_base = OTHER; note = 2'-fluorouridine
  modified_base 13: mod_base = um
  modified_base 14: mod_base = OTHER; note = 2'-fluorocytidine
  modified_base 15: mod_base = cm
  modified_base 16: mod_base = OTHER; note = 2'-fluoroadenosine
  modified_base 17: mod_base = um
  modified_base 18: mod_base = OTHER; note = 2'-fluorouridine
  modified_base 19: mod_base = cm
  modified_base 20: mod_base = OTHER; note = 2'-fluorocytidine
  modified_base 20^21: mod_base = OTHER; note = phosphorothioate linkage
  modified_base 21: mod_base = gm
  source 1..21: mol_type = other RNA
ttgtgttcagtttccattccg

SEQ ID NO: 561 - RNA, 21 nt, synthetic construct
  modified_base 1: mod_base = OTHER; note = 5 -cyclopropyl phosphonate-2 -O-methyluridine
  modified_base 2: mod_base = OTHER; note = 2'-fluorouridine
  modified_base 3: mod_base = gm
  modified_base 4: mod_base = OTHER; note = 2'-fluorouridine
  modified_base 5: mod_base = gm
  modified_base 6: mod_base = OTHER; note = 2'-fluorouridine
  modified_base 7: mod_base = um
  modified_base 8: mod_base = OTHER; note = 2'-fluorocytidine
  modified_base 9: mod_base = OTHER; note = 2'-O-methyladenosine
  modified_base 10: mod_base = OTHER; note = 2'-fluoroguanosine
  modified_base 11: mod_base = um
  modified_base 12: mod_base = OTHER; note = 2'-fluorouridine
  modified_base 13: mod_base = um
  modified_base 14: mod_base = OTHER; note = 2'-fluorocytidine
  modified_base 15: mod_base = cm
  modified_base 16: mod_base = OTHER; note = 2'-fluoroadenosine
  modified_base 17: mod_base = um
  modified_base 18: mod_base = OTHER; note = 2'-fluorouridine
  modified_base 19: mod_base = cm
  modified_base 20: mod_base = OTHER; note = 2'-fluorocytidine
  modified_base 20^21: mod_base = OTHER; note = phosphorothioate linkage
  modified_base 21: mod_base = gm
  source 1..21: mol_type = other RNA
ttgtgttcagtttccattccg

SEQ ID NO: 562 - RNA, 21 nt, synthetic construct
  modified_base 1: mod_base = OTHER; note = 5 -cyclopropyl phosphonate-2 -O-methyluridine
  modified_base 1^2: mod_base = OTHER; note = phosphorothioate linkage
  modified_base 2: mod_base = OTHER; note = 2'-fluorouridine
  modified_base 2^3: mod_base = OTHER; note = phosphorothioate linkage
  modified_base 3: mod_base = gm
  modified_base 3^4: mod_base = OTHER; note = phosphorothioate linkage
  modified_base 4: mod_base = um
  modified_base 5: mod_base = gm
  modified_base 6: mod_base = um
  modified_base 7: mod_base = um
  modified_base 8: mod_base = cm
  modified_base 9: mod_base = OTHER; note = 2'-O-methyladenosine
  modified_base 10: mod_base = gm
  modified_base 11: mod_base = um
  modified_base 12: mod_base = OTHER; note = 2'-fluorouridine
  modified_base 13: mod_base = um
  modified_base 14: mod_base = OTHER; note = 2'-fluorocytidine
  modified_base 15: mod_base = cm
  modified_base 16: mod_base = OTHER; note = 2'-fluoroadenosine
  modified_base 17: mod_base = um
  modified_base 18: mod_base = um
  modified_base 19: mod_base = cm
  modified_base 20: mod_base = cm
  modified_base 20^21: mod_base = OTHER; note = phosphorothioate linkage
  modified_base 21: mod_base = gm
  source 1..21: mol_type = other RNA
ttgtgttcagtttccattccg

SEQ ID NO: 563 - RNA, 21 nt, synthetic construct
  modified_base 1: mod_base = um
  modified_base 1^2: mod_base = OTHER; note = phosphorothioate linkage
  modified_base 2: mod_base = OTHER; note = 2'-fluorouridine
  modified_base 2^3: mod_base = OTHER; note = phosphorothioate linkage
  modified_base 3: mod_base = gm
  modified_base 3^4: mod_base = OTHER; note = phosphorothioate linkage
  modified_base 4: mod_base = um
  modified_base 5: mod_base = gm
  modified_base 6: mod_base = um
  modified_base 7: mod_base = um
  modified_base 8: mod_base = OTHER; note = 2 ,3 -seco-cytidine
  modified_base 9: mod_base = OTHER; note = 2'-O-methyladenosine
  modified_base 10: mod_base = gm
  modified_base 11: mod_base = um
  modified_base 12: mod_base = OTHER; note = 2'-fluorouridine
  modified_base 13: mod_base = um
  modified_base 14: mod_base = OTHER; note = 2'-fluorocytidine
  modified_base 15: mod_base = cm
  modified_base 16: mod_base = OTHER; note = 2'-fluoroadenosine
  modified_base 17: mod_base = um
  modified_base 18: mod_base = um
  modified_base 19: mod_base = cm
  modified_base 20: mod_base = cm
  modified_base 20^21: mod_base = OTHER; note = phosphorothioate linkage
  modified_base 21: mod_base = gm
  source 1..21: mol_type = other RNA
ttgtgttcagtttccattccg

SEQ ID NO: 564 - RNA, 21 nt, synthetic construct
  modified_base 1: mod_base = um
  modified_base 1^2: mod_base = OTHER; note = phosphorothioate linkage
  modified_base 2: mod_base = OTHER; note = 2'-fluorouridine
  modified_base 2^3: mod_base = OTHER; note = phosphorothioate linkage
  modified_base 3: mod_base = gm
  modified_base 3^4: mod_base = OTHER; note = phosphorothioate linkage
  modified_base 4: mod_base = um
  modified_base 5: mod_base = gm
  modified_base 6: mod_base = um
  modified_base 7: mod_base = OTHER; note = 2 ,3 -seco-uridine
  modified_base 8: mod_base = cm
  modified_base 9: mod_base = OTHER; note = 2'-O-methyladenosine
  modified_base 10: mod_base = gm
  modified_base 11: mod_base = um
  modified_base 12: mod_base = OTHER; note = 2'-fluorouridine
  modified_base 13: mod_base = um
  modified_base 14: mod_base = OTHER; note = 2'-fluorocytidine
  modified_base 15: mod_base = cm
  modified_base 16: mod_base = OTHER; note = 2'-fluoroadenosine
  modified_base 17: mod_base = um
  modified_base 18: mod_base = um
  modified_base 19: mod_base = cm
  modified_base 20: mod_base = cm
  modified_base 20^21: mod_base = OTHER; note = phosphorothioate linkage
  modified_base 21: mod_base = gm
  source 1..21: mol_type = other RNA
ttgtgttcagtttccattccg

SEQ ID NO: 565 - RNA, 21 nt, synthetic construct
  modified_base 1: mod_base = um
  modified_base 1^2: mod_base = OTHER; note = phosphorothioate linkage
  modified_base 2: mod_base = OTHER; note = 2'-fluorouridine
  modified_base 2^3: mod_base = OTHER; note = phosphorothioate linkage
  modified_base 3: mod_base = gm
  modified_base 3^4: mod_base = OTHER; note = phosphorothioate linkage
  modified_base 4: mod_base = um
  modified_base 5: mod_base = gm
  modified_base 6: mod_base = OTHER; note = 2 ,3 -seco-uridine
  modified_base 7: mod_base = um
  modified_base 8: mod_base = cm
  modified_base 9: mod_base = OTHER; note = 2'-O-methyladenosine
  modified_base 10: mod_base = gm
  modified_base 11: mod_base = um
  modified_base 12: mod_base = OTHER; note = 2'-fluorouridine
  modified_base 13: mod_base = um
  modified_base 14: mod_base = OTHER; note = 2'-fluorocytidine
  modified_base 15: mod_base = cm
  modified_base 16: mod_base = OTHER; note = 2'-fluoroadenosine
  modified_base 17: mod_base = um
  modified_base 18: mod_base = um
  modified_base 19: mod_base = cm
  modified_base 20: mod_base = cm
  modified_base 20^21: mod_base = OTHER; note = phosphorothioate linkage
  modified_base 21: mod_base = gm
  source 1..21: mol_type = other RNA
ttgtgttcagtttccattccg

SEQ ID NO: 566 - RNA, 21 nt, synthetic construct
  modified_base 1: mod_base = um
  modified_base 1^2: mod_base = OTHER; note = phosphorothioate linkage
  modified_base 2: mod_base = OTHER; note = 2'-fluorouridine
  modified_base 2^3: mod_base = OTHER; note = phosphorothioate linkage
  modified_base 3: mod_base = gm
  modified_base 3^4: mod_base = OTHER; note = phosphorothioate linkage
  modified_base 4: mod_base = um
  modified_base 5: mod_base = gm
  modified_base 6: mod_base = um
  modified_base 7: mod_base = um
  modified_base 8: mod_base = cm
  modified_base 9: mod_base = OTHER; note = 2'-O-methyladenosine
  modified_base 10: mod_base = gm
  modified_base 11: mod_base = um
  modified_base 12: mod_base = OTHER; note = 2'-fluorouridine
  modified_base 13: mod_base = um
  modified_base 14: mod_base = OTHER; note = 2'-fluorocytidine
  modified_base 15: mod_base = cm
  modified_base 16: mod_base = OTHER; note = 2'-fluoroadenosine
  modified_base 17: mod_base = um
  modified_base 18: mod_base = um
  modified_base 19: mod_base = cm
  modified_base 20: mod_base = cm
  modified_base 20^21: mod_base = OTHER; note = phosphorothioate linkage
  modified_base 21: mod_base = cm
  source 1..21: mol_type = other RNA
ttgtgttcagtttccattccc

SEQ ID NO: 567 - RNA, 21 nt, synthetic construct
  modified_base 1: mod_base = um
  modified_base 1^2: mod_base = OTHER; note = phosphorothioate linkage
  modified_base 2: mod_base = OTHER; note = 2'-fluorouridine
  modified_base 2^3: mod_base = OTHER; note = phosphorothioate linkage
  modified_base 3: mod_base = gm
  modified_base 3^4: mod_base = OTHER; note = phosphorothioate linkage
  modified_base 4: mod_base = um
  modified_base 5: mod_base = gm
  modified_base 6: mod_base = um
  modified_base 7: mod_base = um
  modified_base 8: mod_base = cm
  modified_base 9: mod_base = OTHER; note = 2'-O-methyladenosine
  modified_base 10: mod_base = gm
  modified_base 11: mod_base = um
  modified_base 12: mod_base = OTHER; note = 2'-fluorouridine
  modified_base 13: mod_base = um
  modified_base 14: mod_base = OTHER; note = 2'-fluorocytidine
  modified_base 15: mod_base = cm
  modified_base 16: mod_base = OTHER; note = 2'-fluoroadenosine
  modified_base 17: mod_base = um
  modified_base 18: mod_base = um
  modified_base 19: mod_base = cm
  modified_base 20: mod_base = cm
  modified_base 20^21: mod_base = OTHER; note = phosphorothioate linkage
  modified_base 21: mod_base = OTHER; note = 2'-O-methyladenosine
  source 1..21: mol_type = other RNA
ttgtgttcagtttccattcca

SEQ ID NO: 568 - RNA, 21 nt, synthetic construct
  modified_base 1: mod_base = OTHER; note = 5 -cyclopropyl phosphonate-2 -O-methyluridine
  modified_base 2: mod_base = OTHER; note = 2'-fluorouridine
  modified_base 3: mod_base = gm
  modified_base 4: mod_base = um
  modified_base 5: mod_base = gm
  modified_base 6: mod_base = um
  modified_base 7: mod_base = um
  modified_base 8: mod_base = cm
  modified_base 9: mod_base = OTHER; note = 2'-O-methyladenosine
  modified_base 10: mod_base = gm
  modified_base 11: mod_base = um
  modified_base 12: mod_base = OTHER; note = 2'-fluorouridine
  modified_base 13: mod_base = um
  modified_base 14: mod_base = OTHER; note = 2'-fluorocytidine
  modified_base 15: mod_base = cm
  modified_base 16: mod_base = OTHER; note = 2'-fluoroadenosine
  modified_base 17: mod_base = um
  modified_base 18: mod_base = um
  modified_base 19: mod_base = cm
  modified_base 20: mod_base = cm
  modified_base 20^21: mod_base = OTHER; note = phosphorothioate linkage
  modified_base 21: mod_base = gm
  source 1..21: mol_type = other RNA
ttgtgttcagtttccattccg

SEQ ID NO: 569 - RNA, 21 nt, synthetic construct
  modified_base 1: mod_base = OTHER; note = 5 -cyclopropyl phosphonate-2 -O-methyluridine
  modified_base 2: mod_base = OTHER; note = 2'-fluorouridine
  modified_base 3: mod_base = gm
  modified_base 4: mod_base = um
  modified_base 5: mod_base = gm
  modified_base 6: mod_base = um
  modified_base 7: mod_base = OTHER; note = 2 ,3 -seco-uridine
  modified_base 8: mod_base = cm
  modified_base 9: mod_base = OTHER; note = 2'-O-methyladenosine
  modified_base 10: mod_base = gm
  modified_base 11: mod_base = um
  modified_base 12: mod_base = OTHER; note = 2'-fluorouridine
  modified_base 13: mod_base = um
  modified_base 14: mod_base = OTHER; note = 2'-fluorocytidine
  modified_base 15: mod_base = cm
  modified_base 16: mod_base = OTHER; note = 2'-fluoroadenosine
  modified_base 17: mod_base = um
  modified_base 18: mod_base = um
  modified_base 19: mod_base = cm
  modified_base 20: mod_base = cm
  modified_base 20^21: mod_base = OTHER; note = phosphorothioate linkage
  modified_base 21: mod_base = gm
  source 1..21: mol_type = other RNA
ttgtgttcagtttccattccg

SEQ ID NO: 570 - RNA, 21 nt, synthetic construct
  modified_base 1: mod_base = OTHER; note = 5 -cyclopropyl phosphonate-2 -O-methyluridine
  modified_base 2: mod_base = OTHER; note = 2'-fluorouridine
  modified_base 3: mod_base = gm
  modified_base 4: mod_base = um
  modified_base 5: mod_base = gm
  modified_base 6: mod_base = um
  modified_base 7: mod_base = um
  modified_base 8: mod_base = cm
  modified_base 9: mod_base = OTHER; note = 2'-O-methyladenosine
  modified_base 10: mod_base = gm
  modified_base 11: mod_base = um
  modified_base 12: mod_base = OTHER; note = 2'-fluorouridine
  modified_base 13: mod_base = um
  modified_base 14: mod_base = OTHER; note = 2'-fluorocytidine
  modified_base 15: mod_base = cm
  modified_base 16: mod_base = OTHER; note = 2'-fluoroadenosine
  modified_base 17: mod_base = um
  modified_base 18: mod_base = um
  modified_base 19: mod_base = cm
  modified_base 20: mod_base = cm
  modified_base 20^21: mod_base = OTHER; note = phosphorothioate linkage
  modified_base 21: mod_base = cm
  source 1..21: mol_type = other RNA
ttgtgttcagtttccattccc

SEQ ID NO: 571 - RNA, 21 nt, synthetic construct
  modified_base 1: mod_base = OTHER; note = 5 -cyclopropyl phosphonate-2 -O-methyluridine
  modified_base 2: mod_base = OTHER; note = 2'-fluorouridine
  modified_base 3: mod_base = gm
  modified_base 4: mod_base = um
  modified_base 5: mod_base = gm
  modified_base 6: mod_base = um
  modified_base 7: mod_base = OTHER; note = 2 ,3 -seco-uridine
  modified_base 8: mod_base = cm
  modified_base 9: mod_base = OTHER; note = 2'-O-methyladenosine
  modified_base 10: mod_base = gm
  modified_base 11: mod_base = um
  modified_base 12: mod_base = OTHER; note = 2'-fluorouridine
  modified_base 13: mod_base = um
  modified_base 14: mod_base = OTHER; note = 2'-fluorocytidine
  modified_base 15: mod_base = cm
  modified_base 16: mod_base = OTHER; note = 2'-fluoroadenosine
  modified_base 17: mod_base = um
  modified_base 18: mod_base = um
  modified_base 19: mod_base = cm
  modified_base 20: mod_base = cm
  modified_base 20^21: mod_base = OTHER; note = phosphorothioate linkage
  modified_base 21: mod_base = cm
  source 1..21: mol_type = other RNA
ttgtgttcagtttccattccc

SEQ ID NO: 572 - RNA, 21 nt, synthetic construct
  modified_base 1: mod_base = um
  modified_base 1^2: mod_base = OTHER; note = phosphorothioate linkage
  modified_base 2: mod_base = OTHER; note = 2'-fluorouridine
  modified_base 2^3: mod_base = OTHER; note = phosphorothioate linkage
  modified_base 3: mod_base = gm
  modified_base 3^4: mod_base = OTHER; note = phosphorothioate linkage
  modified_base 4: mod_base = um
  modified_base 5: mod_base = gm
  modified_base 6: mod_base = um
  modified_base 7: mod_base = OTHER; note = 2 ,3 -seco-uridine
  modified_base 8: mod_base = cm
  modified_base 9: mod_base = OTHER; note = 2'-O-methyladenosine
  modified_base 10: mod_base = gm
  modified_base 11: mod_base = um
  modified_base 12: mod_base = OTHER; note = 2'-fluorouridine
  modified_base 13: mod_base = um
  modified_base 14: mod_base = OTHER; note = 2'-fluorocytidine
  modified_base 15: mod_base = cm
  modified_base 16: mod_base = OTHER; note = 2'-fluoroadenosine
  modified_base 17: mod_base = um
  modified_base 18: mod_base = um
  modified_base 19: mod_base = cm
  modified_base 20: mod_base = cm
  modified_base 20^21: mod_base = OTHER; note = phosphorothioate linkage
  modified_base 21: mod_base = cm
  source 1..21: mol_type = other RNA
ttgtgttcagtttccattccc

SEQ ID NO: 573 - RNA, 21 nt, synthetic construct
  modified_base 1: mod_base = OTHER; note = 5 -cyclopropyl phosphonate-2 -O-methyluridine
  modified_base 1^2: mod_base = OTHER; note = phosphorothioate linkage
  modified_base 2: mod_base = OTHER; note = 2'-fluorouridine
  modified_base 2^3: mod_base = OTHER; note = phosphorothioate linkage
  modified_base 3: mod_base = gm
  modified_base 3^4: mod_base = OTHER; note = phosphorothioate linkage
  modified_base 4: mod_base = um
  modified_base 5: mod_base = gm
  modified_base 6: mod_base = um
  modified_base 7: mod_base = OTHER; note = 2 ,3 -seco-uridine
  modified_base 8: mod_base = cm
  modified_base 9: mod_base = OTHER; note = 2'-O-methyladenosine
  modified_base 10: mod_base = gm
  modified_base 11: mod_base = um
  modified_base 12: mod_base = OTHER; note = 2'-fluorouridine
  modified_base 13: mod_base = um
  modified_base 14: mod_base = OTHER; note = 2'-fluorocytidine
  modified_base 15: mod_base = cm
  modified_base 16: mod_base = OTHER; note = 2'-fluoroadenosine
  modified_base 17: mod_base = um
  modified_base 18: mod_base = um
  modified_base 19: mod_base = cm
  modified_base 20: mod_base = cm
  modified_base 20^21: mod_base = OTHER; note = phosphorothioate linkage
  modified_base 21: mod_base = gm
  source 1..21: mol_type = other RNA
ttgtgttcagtttccattccg

SEQ ID NO: 574 - RNA, 21 nt, synthetic construct
  modified_base 1: mod_base = OTHER; note = 5 -cyclopropyl phosphonate-2 -O-methyluridine
  modified_base 1^2: mod_base = OTHER; note = phosphorothioate linkage
  modified_base 2: mod_base = OTHER; note = 2'-fluorouridine
  modified_base 2^3: mod_base = OTHER; note = phosphorothioate linkage
  modified_base 3: mod_base = gm
  modified_base 3^4: mod_base = OTHER; note = phosphorothioate linkage
  modified_base 4: mod_base = um
  modified_base 5: mod_base = gm
  modified_base 6: mod_base = um
  modified_base 7: mod_base = um
  modified_base 8: mod_base = cm
  modified_base 9: mod_base = OTHER; note = 2'-O-methyladenosine
  modified_base 10: mod_base = gm
  modified_base 11: mod_base = um
  modified_base 12: mod_base = OTHER; note = 2'-fluorouridine
  modified_base 13: mod_base = um
  modified_base 14: mod_base = OTHER; note = 2'-fluorocytidine
  modified_base 15: mod_base = cm
  modified_base 16: mod_base = OTHER; note = 2'-fluoroadenosine
  modified_base 17: mod_base = um
  modified_base 18: mod_base = um
  modified_base 19: mod_base = cm
  modified_base 20: mod_base = cm
  modified_base 20^21: mod_base = OTHER; note = phosphorothioate linkage
  modified_base 21: mod_base = cm
  source 1..21: mol_type = other RNA
ttgtgttcagtttccattccc

SEQ ID NO: 575 - RNA, 21 nt, synthetic construct
  modified_base 1: mod_base = OTHER; note = 5 -cyclopropyl phosphonate-2 -O-methyluridine
  modified_base 1^2: mod_base = OTHER; note = phosphorothioate linkage
  modified_base 2: mod_base = OTHER; note = 2'-fluorouridine
  modified_base 2^3: mod_base = OTHER; note = phosphorothioate linkage
  modified_base 3: mod_base = gm
  modified_base 3^4: mod_base = OTHER; note = phosphorothioate linkage
  modified_base 4: mod_base = um
  modified_base 5: mod_base = gm
  modified_base 6: mod_base = um
  modified_base 7: mod_base = OTHER; note = 2 ,3 -seco-uridine
  modified_base 8: mod_base = cm
  modified_base 9: mod_base = OTHER; note = 2'-O-methyladenosine
  modified_base 10: mod_base = gm
  modified_base 11: mod_base = um
  modified_base 12: mod_base = OTHER; note = 2'-fluorouridine
  modified_base 13: mod_base = um
  modified_base 14: mod_base = OTHER; note = 2'-fluorocytidine
  modified_base 15: mod_base = cm
  modified_base 16: mod_base = OTHER; note = 2'-fluoroadenosine
  modified_base 17: mod_base = um
  modified_base 18: mod_base = um
  modified_base 19: mod_base = cm
  modified_base 20: mod_base = cm
  modified_base 20^21: mod_base = OTHER; note = phosphorothioate linkage
  modified_base 21: mod_base = cm
  source 1..21: mol_type = other RNA
ttgtgttcagtttccattccc

SEQ ID NO: 576 - RNA, 21 nt, synthetic construct
  modified_base 1: mod_base = um
  modified_base 1^2: mod_base = OTHER; note = phosphorothioate linkage
  modified_base 2: mod_base = OTHER; note = 2'-fluorocytidine
  modified_base 2^3: mod_base = OTHER; note = phosphorothioate linkage
  modified_base 3: mod_base = cm
  modified_base 3^4: mod_base = OTHER; note = phosphorothioate linkage
  modified_base 4: mod_base = OTHER; note = 2'-fluorouridine
  modified_base 5: mod_base = um
  modified_base 6: mod_base = OTHER; note = 2'-fluorouridine
  modified_base 7: mod_base = cm
  modified_base 8: mod_base = OTHER; note = 2'-fluorocytidine
  modified_base 9: mod_base = OTHER; note = 2'-O-methyladenosine
  modified_base 10: mod_base = OTHER; note = 2'-fluorouridine
  modified_base 11: mod_base = um
  modified_base 12: mod_base = OTHER; note = 2'-fluorocytidine
  modified_base 13: mod_base = cm
  modified_base 14: mod_base = OTHER; note = 2'-fluorouridine
  modified_base 15: mod_base = gm
  modified_base 16: mod_base = OTHER; note = 2'-fluorouridine
  modified_base 17: mod_base = um
  modified_base 18: mod_base = OTHER; note = 2'-fluorocytidine
  modified_base 19: mod_base = OTHER; note = 2'-O-methyladenosine
  modified_base 20: mod_base = OTHER; note = 2'-fluorouridine
  modified_base 20^21: mod_base = OTHER; note = phosphorothioate linkage
  modified_base 21: mod_base = cm
  source 1..21: mol_type = other RNA
tcctttccattcctgttcatc

SEQ ID NO: 577 - RNA, 21 nt, synthetic construct
  modified_base 1: mod_base = um
  modified_base 1^2: mod_base = OTHER; note = phosphorothioate linkage
  modified_base 2: mod_base = OTHER; note = 2'-fluorouridine
  modified_base 2^3: mod_base = OTHER; note = phosphorothioate linkage
  modified_base 3: mod_base = OTHER; note = 2'-O-methyladenosine
  modified_base 3^4: mod_base = OTHER; note = phosphorothioate linkage
  modified_base 4: mod_base = OTHER; note = 2'-fluoroguanosine
  modified_base 5: mod_base = OTHER; note = 2'-O-methyladenosine
  modified_base 6: mod_base = OTHER; note = 2'-fluorocytidine
  modified_base 7: mod_base = OTHER; note = 2'-O-methyladenosine
  modified_base 8: mod_base = OTHER; note = 2'-fluorocytidine
  modified_base 9: mod_base = gm
  modified_base 10: mod_base = OTHER; note = 2'-fluoroguanosine
  modified_base 11: mod_base = OTHER; note = 2'-O-methyladenosine
  modified_base 12: mod_base = OTHER; note = 2'-fluorocytidine
  modified_base 13: mod_base = um
  modified_base 14: mod_base = OTHER; note = 2'-fluorocytidine
  modified_base 15: mod_base = gm
  modified_base 16: mod_base = OTHER; note = 2'-fluoroguanosine
  modified_base 17: mod_base = um
  modified_base 18: mod_base = OTHER; note = 2'-fluoroadenosine
  modified_base 19: mod_base = gm
  modified_base 20: mod_base = OTHER; note = 2'-fluorouridine
  modified_base 20^21: mod_base = OTHER; note = phosphorothioate linkage
  modified_base 21: mod_base = cm
  source 1..21: mol_type = other RNA
ttagacacggactcggtagtc

SEQ ID NO: 578 - RNA, 21 nt, synthetic construct
  modified_base 1: mod_base = OTHER; note = 2'-O-methyladenosine
  modified_base 1^2: mod_base = OTHER; note = phosphorothioate linkage
  modified_base 2: mod_base = OTHER; note = 2'-fluorouridine
  modified_base 2^3: mod_base = OTHER; note = phosphorothioate linkage
  modified_base 3: mod_base = OTHER; note = 2'-O-methyladenosine
  modified_base 3^4: mod_base = OTHER; note = phosphorothioate linkage
  modified_base 4: mod_base = OTHER; note = 2'-fluorocytidine
  modified_base 5: mod_base = um
  modified_base 6: mod_base = OTHER; note = 2'-fluorocytidine
  modified_base 7: mod_base = cm
  modified_base 8: mod_base = OTHER; note = 2'-fluorocytidine
  modified_base 9: mod_base = um
  modified_base 10: mod_base = OTHER; note = 2'-fluorouridine
  modified_base 11: mod_base = cm
  modified_base 12: mod_base = OTHER; note = 2'-fluorouridine
  modified_base 13: mod_base = cm
  modified_base 14: mod_base = OTHER; note = 2'-fluoroadenosine
  modified_base 15: mod_base = um
  modified_base 16: mod_base = OTHER; note = 2'-fluorouridine
  modified_base 17: mod_base = OTHER; note = 2'-O-methyladenosine
  modified_base 18: mod_base = OTHER; note = 2'-fluoroguanosine
  modified_base 19: mod_base = gm
  modified_base 20: mod_base = OTHER; note = 2'-fluorocytidine
  modified_base 20^21: mod_base = OTHER; note = phosphorothioate linkage
  modified_base 21: mod_base = OTHER; note = 2'-O-methyladenosine
  source 1..21: mol_type = other RNA
atactcccttctcattaggca

SEQ ID NO: 579 - RNA, 21 nt, synthetic construct
  modified_base 1: mod_base = OTHER; note = 5 -cyclopropyl phosphonate-2 -O-methyluridine
  modified_base 1^2: mod_base = OTHER; note = phosphorothioate linkage
  modified_base 2: mod_base = OTHER; note = 2'-fluoroguanosine
  modified_base 2^3: mod_base = OTHER; note = phosphorothioate linkage
  modified_base 3: mod_base = OTHER; note = 2'-O-methyladenosine
  modified_base 3^4: mod_base = OTHER; note = phosphorothioate linkage
  modified_base 4: mod_base = OTHER; note = 2'-fluorouridine
  modified_base 5: mod_base = gm
  modified_base 6: mod_base = OTHER; note = 2'-fluorouridine
  modified_base 7: mod_base = um
  modified_base 8: mod_base = OTHER; note = 2'-fluorouridine
  modified_base 9: mod_base = um
  modified_base 10: mod_base = OTHER; note = 2'-fluoroguanosine
  modified_base 11: mod_base = OTHER; note = 2'-O-methyladenosine
  modified_base 12: mod_base = OTHER; note = 2'-fluoroguanosine
  modified_base 13: mod_base = cm
  modified_base 14: mod_base = OTHER; note = 2'-fluoroadenosine
  modified_base 15: mod_base = cm
  modified_base 16: mod_base = OTHER; note = 2'-fluorocytidine
  modified_base 17: mod_base = um
  modified_base 18: mod_base = OTHER; note = 2'-fluoroadenosine
  modified_base 19: mod_base = cm
  modified_base 20: mod_base = OTHER; note = 2'-fluorouridine
  modified_base 20^21: mod_base = OTHER; note = phosphorothioate linkage
  modified_base 21: mod_base = cm
  source 1..21: mol_type = other RNA
tgatgttttgagcacctactc

SEQ ID NO: 580 - RNA, 21 nt, synthetic construct
  modified_base 1: mod_base = um
  modified_base 1^2: mod_base = OTHER; note = phosphorothioate linkage
  modified_base 2: mod_base = OTHER; note = 2'-fluoroguanosine
  modified_base 2^3: mod_base = OTHER; note = phosphorothioate linkage
  modified_base 3: mod_base = OTHER; note = 2'-O-methyladenosine
  modified_base 3^4: mod_base = OTHER; note = phosphorothioate linkage
  modified_base 4: mod_base = um
  modified_base 5: mod_base = gm
  modified_base 6: mod_base = um
  modified_base 7: mod_base = um
  modified_base 8: mod_base = um
  modified_base 9: mod_base = um
  modified_base 10: mod_base = gm
  modified_base 11: mod_base = OTHER; note = 2'-O-methyladenosine
  modified_base 12: mod_base = OTHER; note = 2'-fluoroguanosine
  modified_base 13: mod_base = cm
  modified_base 14: mod_base = OTHER; note = 2'-fluoroadenosine
  modified_base 15: mod_base = cm
  modified_base 16: mod_base = OTHER; note = 2'-fluorocytidine
  modified_base 17: mod_base = um
  modified_base 18: mod_base = OTHER; note = 2'-O-methyladenosine
  modified_base 19: mod_base = cm
  modified_base 20: mod_base = um
  modified_base 20^21: mod_base = OTHER; note = phosphorothioate linkage
  modified_base 21: mod_base = cm
  source 1..21: mol_type = other RNA
tgatgttttgagcacctactc

SEQ ID NO: 581 - RNA, 21 nt, synthetic construct
  modified_base 1: mod_base = OTHER; note = 5 -cyclopropyl phosphonate-2 -O-methyluridine
  modified_base 1^2: mod_base = OTHER; note = phosphorothioate linkage
  modified_base 2: mod_base = OTHER; note = 2'-fluoroguanosine
  modified_base 2^3: mod_base = OTHER; note = phosphorothioate linkage
  modified_base 3: mod_base = OTHER; note = 2'-O-methyladenosine
  modified_base 3^4: mod_base = OTHER; note = phosphorothioate linkage
  modified_base 4: mod_base = um
  modified_base 5: mod_base = gm
  modified_base 6: mod_base = um
  modified_base 7: mod_base = um
  modified_base 8: mod_base = um
  modified_base 9: mod_base = um
  modified_base 10: mod_base = gm
  modified_base 11: mod_base = OTHER; note = 2'-O-methyladenosine
  modified_base 12: mod_base = OTHER; note = 2'-fluoroguanosine
  modified_base 13: mod_base = cm
  modified_base 14: mod_base = OTHER; note = 2'-fluoroadenosine
  modified_base 15: mod_base = cm
  modified_base 16: mod_base = OTHER; note = 2'-fluorocytidine
  modified_base 17: mod_base = um
  modified_base 18: mod_base = OTHER; note = 2'-O-methyladenosine
  modified_base 19: mod_base = cm
  modified_base 20: mod_base = um
  modified_base 20^21: mod_base = OTHER; note = phosphorothioate linkage
  modified_base 21: mod_base = cm
  source 1..21: mol_type = other RNA
tgatgttttgagcacctactc

SEQ ID NO: 582 - RNA, 21 nt, synthetic construct
  modified_base 1: mod_base = OTHER; note = 5 -cyclopropyl phosphonate-2 -O-methyluridine
  modified_base 1^2: mod_base = OTHER; note = phosphorothioate linkage
  modified_base 2: mod_base = OTHER; note = 2'-fluorouridine
  modified_base 2^3: mod_base = OTHER; note = phosphorothioate linkage
  modified_base 3: mod_base = cm
  modified_base 3^4: mod_base = OTHER; note = phosphorothioate linkage
  modified_base 4: mod_base = OTHER; note = 2'-fluorocytidine
  modified_base 5: mod_base = OTHER; note = 2'-O-methyladenosine
  modified_base 6: mod_base = OTHER; note = 2'-fluorouridine
  modified_base 7: mod_base = um
  modified_base 8: mod_base = OTHER; note = 2'-fluorocytidine
  modified_base 9: mod_base = cm
  modified_base 10: mod_base = OTHER; note = 2'-fluorouridine
  modified_base 11: mod_base = gm
  modified_base 12: mod_base = OTHER; note = 2'-fluorouridine
  modified_base 13: mod_base = um
  modified_base 14: mod_base = OTHER; note = 2'-fluorocytidine
  modified_base 15: mod_base = OTHER; note = 2'-O-methyladenosine
  modified_base 16: mod_base = OTHER; note = 2'-fluorouridine
  modified_base 17: mod_base = um
  modified_base 18: mod_base = OTHER; note = 2'-fluoroguanosine
  modified_base 19: mod_base = cm
  modified_base 20: mod_base = OTHER; note = 2'-fluorocytidine
  modified_base 20^21: mod_base = OTHER; note = phosphorothioate linkage
  modified_base 21: mod_base = um
  source 1..21: mol_type = other RNA
ttccattcctgttcattgcct

SEQ ID NO: 583 - RNA, 21 nt, synthetic construct
  modified_base 1: mod_base = um
  modified_base 1^2: mod_base = OTHER; note = phosphorothioate linkage
  modified_base 2: mod_base = OTHER; note = 2'-fluorouridine
  modified_base 2^3: mod_base = OTHER; note = phosphorothioate linkage
  modified_base 3: mod_base = cm
  modified_base 3^4: mod_base = OTHER; note = phosphorothioate linkage
  modified_base 4: mod_base = cm
  modified_base 5: mod_base = OTHER; note = 2'-O-methyladenosine
  modified_base 6: mod_base = um
  modified_base 7: mod_base = um
  modified_base 8: mod_base = cm
  modified_base 9: mod_base = cm
  modified_base 10: mod_base = um
  modified_base 11: mod_base = gm
  modified_base 12: mod_base = OTHER; note = 2'-fluorouridine
  modified_base 13: mod_base = um
  modified_base 14: mod_base = OTHER; note = 2'-fluorocytidine
  modified_base 15: mod_base = OTHER; note = 2'-O-methyladenosine
  modified_base 16: mod_base = OTHER; note = 2'-fluorouridine
  modified_base 17: mod_base = um
  modified_base 18: mod_base = gm
  modified_base 19: mod_base = cm
  modified_base 20: mod_base = cm
  modified_base 20^21: mod_base = OTHER; note = phosphorothioate linkage
  modified_base 21: mod_base = um
  source 1..21: mol_type = other RNA
ttccattcctgttcattgcct

SEQ ID NO: 584 - RNA, 21 nt, synthetic construct
  modified_base 1: mod_base = OTHER; note = 5 -cyclopropyl phosphonate-2 -O-methyluridine
  modified_base 1^2: mod_base = OTHER; note = phosphorothioate linkage
  modified_base 2: mod_base = OTHER; note = 2'-fluorouridine
  modified_base 2^3: mod_base = OTHER; note = phosphorothioate linkage
  modified_base 3: mod_base = cm
  modified_base 3^4: mod_base = OTHER; note = phosphorothioate linkage
  modified_base 4: mod_base = cm
  modified_base 5: mod_base = OTHER; note = 2'-O-methyladenosine
  modified_base 6: mod_base = um
  modified_base 7: mod_base = um
  modified_base 8: mod_base = cm
  modified_base 9: mod_base = cm
  modified_base 10: mod_base = um
  modified_base 11: mod_base = gm
  modified_base 12: mod_base = OTHER; note = 2'-fluorouridine
  modified_base 13: mod_base = um
  modified_base 14: mod_base = OTHER; note = 2'-fluorocytidine
  modified_base 15: mod_base = OTHER; note = 2'-O-methyladenosine
  modified_base 16: mod_base = OTHER; note = 2'-fluorouridine
  modified_base 17: mod_base = um
  modified_base 18: mod_base = gm
  modified_base 19: mod_base = cm
  modified_base 20: mod_base = cm
  modified_base 20^21: mod_base = OTHER; note = phosphorothioate linkage
  modified_base 21: mod_base = um
  source 1..21: mol_type = other RNA
ttccattcctgttcattgcct

SEQ ID NO: 585 - RNA, 21 nt, synthetic construct
  modified_base 1: mod_base = um
  modified_base 1^2: mod_base = OTHER; note = phosphorothioate linkage
  modified_base 2: mod_base = OTHER; note = 2'-fluorouridine
  modified_base 2^3: mod_base = OTHER; note = phosphorothioate linkage
  modified_base 3: mod_base = cm
  modified_base 3^4: mod_base = OTHER; note = phosphorothioate linkage
  modified_base 4: mod_base = cm
  modified_base 5: mod_base = OTHER; note = 2'-O-methyladenosine
  modified_base 6: mod_base = um
  modified_base 7: mod_base = OTHER; note = 2 ,3 -seco-uridine
  modified_base 8: mod_base = cm
  modified_base 9: mod_base = cm
  modified_base 10: mod_base = um
  modified_base 11: mod_base = gm
  modified_base 12: mod_base = OTHER; note = 2'-fluorouridine
  modified_base 13: mod_base = um
  modified_base 14: mod_base = OTHER; note = 2'-fluorocytidine
  modified_base 15: mod_base = OTHER; note = 2'-O-methyladenosine
  modified_base 16: mod_base = OTHER; note = 2'-fluorouridine
  modified_base 17: mod_base = um
  modified_base 18: mod_base = gm
  modified_base 19: mod_base = cm
  modified_base 20: mod_base = cm
  modified_base 20^21: mod_base = OTHER; note = phosphorothioate linkage
  modified_base 21: mod_base = um
  source 1..21: mol_type = other RNA
ttccattcctgttcattgcct

SEQ ID NO: 586 - RNA, 21 nt, synthetic construct
  modified_base 1: mod_base = um
  modified_base 1^2: mod_base = OTHER; note = phosphorothioate linkage
  modified_base 2: mod_base = OTHER; note = 2'-fluorouridine
  modified_base 2^3: mod_base = OTHER; note = phosphorothioate linkage
  modified_base 3: mod_base = cm
  modified_base 3^4: mod_base = OTHER; note = phosphorothioate linkage
  modified_base 4: mod_base = cm
  modified_base 5: mod_base = OTHER; note = 2'-O-methyladenosine
  modified_base 6: mod_base = OTHER; note = 2 ,3 -seco-uridine
  modified_base 7: mod_base = um
  modified_base 8: mod_base = cm
  modified_base 9: mod_base = cm
  modified_base 10: mod_base = um
  modified_base 11: mod_base = gm
  modified_base 12: mod_base = OTHER; note = 2'-fluorouridine
  modified_base 13: mod_base = um
  modified_base 14: mod_base = OTHER; note = 2'-fluorocytidine
  modified_base 15: mod_base = OTHER; note = 2'-O-methyladenosine
  modified_base 16: mod_base = OTHER; note = 2'-fluorouridine
  modified_base 17: mod_base = um
  modified_base 18: mod_base = gm
  modified_base 19: mod_base = cm
  modified_base 20: mod_base = cm
  modified_base 20^21: mod_base = OTHER; note = phosphorothioate linkage
  modified_base 21: mod_base = um
  source 1..21: mol_type = other RNA
ttccattcctgttcattgcct

SEQ ID NO: 587 - RNA, 21 nt, synthetic construct
  modified_base 1: mod_base = um
  modified_base 1^2: mod_base = OTHER; note = phosphorothioate linkage
  modified_base 2: mod_base = OTHER; note = 2'-fluorouridine
  modified_base 2^3: mod_base = OTHER; note = phosphorothioate linkage
  modified_base 3: mod_base = cm
  modified_base 3^4: mod_base = OTHER; note = phosphorothioate linkage
  modified_base 4: mod_base = cm
  modified_base 5: mod_base = OTHER; note = 2'-O-methyladenosine
  modified_base 6: mod_base = um
  modified_base 7: mod_base = um
  modified_base 8: mod_base = cm
  modified_base 9: mod_base = cm
  modified_base 10: mod_base = um
  modified_base 11: mod_base = gm
  modified_base 12: mod_base = OTHER; note = 2'-fluorouridine
  modified_base 13: mod_base = um
  modified_base 14: mod_base = OTHER; note = 2'-fluorocytidine
  modified_base 15: mod_base = OTHER; note = 2'-O-methyladenosine
  modified_base 16: mod_base = OTHER; note = 2'-fluorouridine
  modified_base 17: mod_base = um
  modified_base 18: mod_base = gm
  modified_base 19: mod_base = cm
  modified_base 20: mod_base = cm
  modified_base 20^21: mod_base = OTHER; note = phosphorothioate linkage
  modified_base 21: mod_base = cm
  source 1..21: mol_type = other RNA
ttccattcctgttcattgccc

SEQ ID NO: 588 - RNA, 21 nt, synthetic construct
  modified_base 1: mod_base = um
  modified_base 1^2: mod_base = OTHER; note = phosphorothioate linkage
  modified_base 2: mod_base = OTHER; note = 2'-fluoroguanosine
  modified_base 2^3: mod_base = OTHER; note = phosphorothioate linkage
  modified_base 3: mod_base = OTHER; note = 2'-O-methyladenosine
  modified_base 3^4: mod_base = OTHER; note = phosphorothioate linkage
  modified_base 4: mod_base = um
  modified_base 5: mod_base = gm
  modified_base 6: mod_base = um
  modified_base 7: mod_base = um
  modified_base 8: mod_base = um
  modified_base 9: mod_base = um
  modified_base 10: mod_base = gm
  modified_base 11: mod_base = OTHER; note = 2'-O-methyladenosine
  modified_base 12: mod_base = OTHER; note = 2'-fluoroguanosine
  modified_base 13: mod_base = cm
  modified_base 14: mod_base = OTHER; note = 2'-fluoroadenosine
  modified_base 15: mod_base = cm
  modified_base 16: mod_base = OTHER; note = 2'-fluorocytidine
  modified_base 17: mod_base = um
  modified_base 18: mod_base = OTHER; note = 2'-O-methyladenosine
  modified_base 19: mod_base = cm
  modified_base 20: mod_base = um
  modified_base 20^21: mod_base = OTHER; note = phosphorothioate linkage
  modified_base 21: mod_base = gm
  source 1..21: mol_type = other RNA
tgatgttttgagcacctactg

SEQ ID NO: 589 - RNA, 21 nt, synthetic construct
  modified_base 1: mod_base = um
  modified_base 1^2: mod_base = OTHER; note = phosphorothioate linkage
  modified_base 2: mod_base = OTHER; note = 2'-fluoroguanosine
  modified_base 2^3: mod_base = OTHER; note = phosphorothioate linkage
  modified_base 3: mod_base = OTHER; note = 2'-O-methyladenosine
  modified_base 3^4: mod_base = OTHER; note = phosphorothioate linkage
  modified_base 4: mod_base = um
  modified_base 5: mod_base = gm
  modified_base 6: mod_base = um
  modified_base 7: mod_base = OTHER; note = 2 ,3 -seco-uridine
  modified_base 8: mod_base = um
  modified_base 9: mod_base = um
  modified_base 10: mod_base = gm
  modified_base 11: mod_base = OTHER; note = 2'-O-methyladenosine
  modified_base 12: mod_base = OTHER; note = 2'-fluoroguanosine
  modified_base 13: mod_base = cm
  modified_base 14: mod_base = OTHER; note = 2'-fluoroadenosine
  modified_base 15: mod_base = cm
  modified_base 16: mod_base = OTHER; note = 2'-fluorocytidine
  modified_base 17: mod_base = um
  modified_base 18: mod_base = OTHER; note = 2'-O-methyladenosine
  modified_base 19: mod_base = cm
  modified_base 20: mod_base = um
  modified_base 20^21: mod_base = OTHER; note = phosphorothioate linkage
  modified_base 21: mod_base = cm
  source 1..21: mol_type = other RNA
tgatgttttgagcacctactc

SEQ ID NO: 590 - RNA, 21 nt, synthetic construct
  modified_base 1: mod_base = um
  modified_base 1^2: mod_base = OTHER; note = phosphorothioate linkage
  modified_base 2: mod_base = OTHER; note = 2'-fluoroguanosine
  modified_base 2^3: mod_base = OTHER; note = phosphorothioate linkage
  modified_base 3: mod_base = OTHER; note = 2'-O-methyladenosine
  modified_base 3^4: mod_base = OTHER; note = phosphorothioate linkage
  modified_base 4: mod_base = um
  modified_base 5: mod_base = gm
  modified_base 6: mod_base = um
  modified_base 7: mod_base = um
  modified_base 8: mod_base = um
  modified_base 9: mod_base = um
  modified_base 10: mod_base = gm
  modified_base 11: mod_base = OTHER; note = 2'-O-methyladenosine
  modified_base 12: mod_base = OTHER; note = 2'-fluoroguanosine
  modified_base 13: mod_base = cm
  modified_base 14: mod_base = OTHER; note = 2'-fluoroadenosine
  modified_base 15: mod_base = cm
  modified_base 16: mod_base = OTHER; note = 2'-fluorocytidine
  modified_base 17: mod_base = um
  modified_base 18: mod_base = OTHER; note = 2'-O-methyladenosine
  modified_base 19: mod_base = cm
  modified_base 20: mod_base = um
  modified_base 20^21: mod_base = OTHER; note = phosphorothioate linkage
  modified_base 21: mod_base = OTHER; note = 2'-O-methyladenosine
  source 1..21: mol_type = other RNA
tgatgttttgagcacctacta

SEQ ID NO: 591 - RNA, 21 nt, synthetic construct
  modified_base 1: mod_base = um
  modified_base 1^2: mod_base = OTHER; note = phosphorothioate linkage
  modified_base 2: mod_base = OTHER; note = 2'-fluorouridine
  modified_base 2^3: mod_base = OTHER; note = phosphorothioate linkage
  modified_base 3: mod_base = cm
  modified_base 3^4: mod_base = OTHER; note = phosphorothioate linkage
  modified_base 4: mod_base = OTHER; note = 2'-fluorocytidine
  modified_base 5: mod_base = OTHER; note = 2'-O-methyladenosine
  modified_base 6: mod_base = OTHER; note = 2'-fluorouridine
  modified_base 7: mod_base = um
  modified_base 8: mod_base = cm
  modified_base 9: mod_base = cm
  modified_base 10: mod_base = um
  modified_base 11: mod_base = gm
  modified_base 12: mod_base = OTHER; note = 2'-fluorouridine
  modified_base 13: mod_base = um
  modified_base 14: mod_base = OTHER; note = 2'-fluorocytidine
  modified_base 15: mod_base = OTHER; note = 2'-O-methyladenosine
  modified_base 16: mod_base = OTHER; note = 2'-fluorouridine
  modified_base 17: mod_base = um
  modified_base 18: mod_base = OTHER; note = 2'-fluoroguanosine
  modified_base 19: mod_base = cm
  modified_base 20: mod_base = cm
  modified_base 20^21: mod_base = OTHER; note = phosphorothioate linkage
  modified_base 21: mod_base = um
  source 1..21: mol_type = other RNA
ttccattcctgttcattgcct

SEQ ID NO: 592 - RNA, 21 nt, synthetic construct
  modified_base 1: mod_base = OTHER; note = 5 -cyclopropyl phosphonate-2 -O-methyluridine
  modified_base 1^2: mod_base = OTHER; note = phosphorothioate linkage
  modified_base 2: mod_base = OTHER; note = 2'-fluorouridine
  modified_base 2^3: mod_base = OTHER; note = phosphorothioate linkage
  modified_base 3: mod_base = cm
  modified_base 3^4: mod_base = OTHER; note = phosphorothioate linkage
  modified_base 4: mod_base = OTHER; note = 2'-fluorocytidine
  modified_base 5: mod_base = OTHER; note = 2'-O-methyladenosine
  modified_base 6: mod_base = OTHER; note = 2'-fluorouridine
  modified_base 7: mod_base = um
  modified_base 8: mod_base = cm
  modified_base 9: mod_base = cm
  modified_base 10: mod_base = um
  modified_base 11: mod_base = gm
  modified_base 12: mod_base = OTHER; note = 2'-fluorouridine
  modified_base 13: mod_base = um
  modified_base 14: mod_base = OTHER; note = 2'-fluorocytidine
  modified_base 15: mod_base = OTHER; note = 2'-O-methyladenosine
  modified_base 16: mod_base = OTHER; note = 2'-fluorouridine
  modified_base 17: mod_base = um
  modified_base 18: mod_base = OTHER; note = 2'-fluoroguanosine
  modified_base 19: mod_base = cm
  modified_base 20: mod_base = cm
  modified_base 20^21: mod_base = OTHER; note = phosphorothioate linkage
  modified_base 21: mod_base = um
  source 1..21: mol_type = other RNA
ttccattcctgttcattgcct

SEQ ID NO: 593 - RNA, 21 nt, synthetic construct
  modified_base 1: mod_base = OTHER; note = 5 -cyclopropyl phosphonate-2 -O-methyluridine
  modified_base 2: mod_base = OTHER; note = 2'-fluorouridine
  modified_base 3: mod_base = cm
  modified_base 4: mod_base = OTHER; note = 2'-fluorocytidine
  modified_base 5: mod_base = OTHER; note = 2'-O-methyladenosine
  modified_base 6: mod_base = OTHER; note = 2'-fluorouridine
  modified_base 7: mod_base = um
  modified_base 8: mod_base = cm
  modified_base 9: mod_base = cm
  modified_base 10: mod_base = um
  modified_base 11: mod_base = gm
  modified_base 12: mod_base = OTHER; note = 2'-fluorouridine
  modified_base 13: mod_base = um
  modified_base 14: mod_base = OTHER; note = 2'-fluorocytidine
  modified_base 15: mod_base = OTHER; note = 2'-O-methyladenosine
  modified_base 16: mod_base = OTHER; note = 2'-fluorouridine
  modified_base 17: mod_base = um
  modified_base 18: mod_base = OTHER; note = 2'-fluoroguanosine
  modified_base 19: mod_base = cm
  modified_base 20: mod_base = cm
  modified_base 20^21: mod_base = OTHER; note = phosphorothioate linkage
  modified_base 21: mod_base = um
  source 1..21: mol_type = other RNA
ttccattcctgttcattgcct

SEQ ID NO: 594 - RNA, 21 nt, synthetic construct
  modified_base 1: mod_base = um
  modified_base 1^2: mod_base = OTHER; note = phosphorothioate linkage
  modified_base 2: mod_base = OTHER; note = 2'-fluorouridine
  modified_base 2^3: mod_base = OTHER; note = phosphorothioate linkage
  modified_base 3: mod_base = gm
  modified_base 3^4: mod_base = OTHER; note = phosphorothioate linkage
  modified_base 4: mod_base = OTHER; note = 2'-fluorouridine
  modified_base 5: mod_base = gm
  modified_base 6: mod_base = um
  modified_base 7: mod_base = um
  modified_base 8: mod_base = cm
  modified_base 9: mod_base = OTHER; note = 2'-O-methyladenosine
  modified_base 10: mod_base = gm
  modified_base 11: mod_base = um
  modified_base 12: mod_base = OTHER; note = 2'-fluorouridine
  modified_base 13: mod_base = um
  modified_base 14: mod_base = OTHER; note = 2'-fluorocytidine
  modified_base 15: mod_base = cm
  modified_base 16: mod_base = OTHER; note = 2'-fluoroadenosine
  modified_base 17: mod_base = um
  modified_base 18: mod_base = um
  modified_base 19: mod_base = cm
  modified_base 20: mod_base = cm
  modified_base 20^21: mod_base = OTHER; note = phosphorothioate linkage
  modified_base 21: mod_base = gm
  source 1..21: mol_type = other RNA
ttgtgttcagtttccattccg

SEQ ID NO: 595 - RNA, 21 nt, synthetic construct
  modified_base 1: mod_base = um
  modified_base 1^2: mod_base = OTHER; note = phosphorothioate linkage
  modified_base 2: mod_base = OTHER; note = 2'-fluorouridine
  modified_base 2^3: mod_base = OTHER; note = phosphorothioate linkage
  modified_base 3: mod_base = gm
  modified_base 3^4: mod_base = OTHER; note = phosphorothioate linkage
  modified_base 4: mod_base = um
  modified_base 5: mod_base = gm
  modified_base 6: mod_base = um
  modified_base 7: mod_base = OTHER; note = 2'-fluorouridine
  modified_base 8: mod_base = cm
  modified_base 9: mod_base = OTHER; note = 2'-O-methyladenosine
  modified_base 10: mod_base = gm
  modified_base 11: mod_base = um
  modified_base 12: mod_base = OTHER; note = 2'-fluorouridine
  modified_base 13: mod_base = um
  modified_base 14: mod_base = OTHER; note = 2'-fluorocytidine
  modified_base 15: mod_base = cm
  modified_base 16: mod_base = OTHER; note = 2'-fluoroadenosine
  modified_base 17: mod_base = um
  modified_base 18: mod_base = um
  modified_base 19: mod_base = cm
  modified_base 20: mod_base = cm
  modified_base 20^21: mod_base = OTHER; note = phosphorothioate linkage
  modified_base 21: mod_base = gm
  source 1..21: mol_type = other RNA
ttgtgttcagtttccattccg

SEQ ID NO: 596 - RNA, 21 nt, synthetic construct
  modified_base 1: mod_base = um
  modified_base 1^2: mod_base = OTHER; note = phosphorothioate linkage
  modified_base 2: mod_base = OTHER; note = 2'-fluoroguanosine
  modified_base 2^3: mod_base = OTHER; note = phosphorothioate linkage
  modified_base 3: mod_base = OTHER; note = 2'-O-methyladenosine
  modified_base 3^4: mod_base = OTHER; note = phosphorothioate linkage
  modified_base 4: mod_base = OTHER; note = 2'-fluorouridine
  modified_base 5: mod_base = gm
  modified_base 6: mod_base = um
  modified_base 7: mod_base = um
  modified_base 8: mod_base = um
  modified_base 9: mod_base = um
  modified_base 10: mod_base = gm
  modified_base 11: mod_base = OTHER; note = 2'-O-methyladenosine
  modified_base 12: mod_base = OTHER; note = 2'-fluoroguanosine
  modified_base 13: mod_base = cm
  modified_base 14: mod_base = OTHER; note = 2'-fluoroadenosine
  modified_base 15: mod_base = cm
  modified_base 16: mod_base = OTHER; note = 2'-fluorocytidine
  modified_base 17: mod_base = um
  modified_base 18: mod_base = OTHER; note = 2'-O-methyladenosine
  modified_base 19: mod_base = cm
  modified_base 20: mod_base = um
  modified_base 20^21: mod_base = OTHER; note = phosphorothioate linkage
  modified_base 21: mod_base = cm
  source 1..21: mol_type = other RNA
tgatgttttgagcacctactc

SEQ ID NO: 597 - RNA, 21 nt, synthetic construct
  modified_base 1: mod_base = um
  modified_base 1^2: mod_base = OTHER; note = phosphorothioate linkage
  modified_base 2: mod_base = OTHER; note = 2'-fluoroguanosine
  modified_base 2^3: mod_base = OTHER; note = phosphorothioate linkage
  modified_base 3: mod_base = OTHER; note = 2'-O-methyladenosine
  modified_base 3^4: mod_base = OTHER; note = phosphorothioate linkage
  modified_base 4: mod_base = um
  modified_base 5: mod_base = gm
  modified_base 6: mod_base = um
  modified_base 7: mod_base = um
  modified_base 8: mod_base = um
  modified_base 9: mod_base = um
  modified_base 10: mod_base = gm
  modified_base 11: mod_base = OTHER; note = 2'-O-methyladenosine
  modified_base 12: mod_base = OTHER; note = 2'-fluoroguanosine
  modified_base 13: mod_base = cm
  modified_base 14: mod_base = OTHER; note = 2'-fluoroadenosine
  modified_base 15: mod_base = cm
  modified_base 16: mod_base = OTHER; note = 2'-fluorocytidine
  modified_base 17: mod_base = um
  modified_base 18: mod_base = OTHER; note = 2'-fluoroadenosine
  modified_base 19: mod_base = cm
  modified_base 20: mod_base = um
  modified_base 20^21: mod_base = OTHER; note = phosphorothioate linkage
  modified_base 21: mod_base = cm
  source 1..21: mol_type = other RNA
tgatgttttgagcacctactc

SEQ ID NO: 598 - RNA, 21 nt, synthetic construct
  modified_base 1: mod_base = um
  modified_base 1^2: mod_base = OTHER; note = phosphorothioate linkage
  modified_base 2: mod_base = OTHER; note = 2'-fluoroguanosine
  modified_base 2^3: mod_base = OTHER; note = phosphorothioate linkage
  modified_base 3: mod_base = OTHER; note = 2'-O-methyladenosine
  modified_base 3^4: mod_base = OTHER; note = phosphorothioate linkage
  modified_base 4: mod_base = um
  modified_base 5: mod_base = gm
  modified_base 6: mod_base = um
  modified_base 7: mod_base = OTHER; note = 2'-fluorouridine
  modified_base 8: mod_base = um
  modified_base 9: mod_base = um
  modified_base 10: mod_base = gm
  modified_base 11: mod_base = OTHER; note = 2'-O-methyladenosine
  modified_base 12: mod_base = OTHER; note = 2'-fluoroguanosine
  modified_base 13: mod_base = cm
  modified_base 14: mod_base = OTHER; note = 2'-fluoroadenosine
  modified_base 15: mod_base = cm
  modified_base 16: mod_base = OTHER; note = 2'-fluorocytidine
  modified_base 17: mod_base = um
  modified_base 18: mod_base = OTHER; note = 2'-O-methyladenosine
  modified_base 19: mod_base = cm
  modified_base 20: mod_base = um
  modified_base 20^21: mod_base = OTHER; note = phosphorothioate linkage
  modified_base 21: mod_base = cm
  source 1..21: mol_type = other RNA
tgatgttttgagcacctactc

SEQ ID NO: 599 - RNA, 21 nt, synthetic construct
  modified_base 1: mod_base = OTHER; note = 5 -cyclopropyl phosphonate-2 -O-methyluridine
  modified_base 1^2: mod_base = OTHER; note = phosphorothioate linkage
  modified_base 2: mod_base = OTHER; note = 2'-fluorouridine
  modified_base 2^3: mod_base = OTHER; note = phosphorothioate linkage
  modified_base 3: mod_base = gm
  modified_base 3^4: mod_base = OTHER; note = phosphorothioate linkage
  modified_base 4: mod_base = um
  modified_base 5: mod_base = gm
  modified_base 6: mod_base = um
  modified_base 7: mod_base = um
  modified_base 8: mod_base = cm
  modified_base 9: mod_base = OTHER; note = 2'-O-methyladenosine
  modified_base 10: mod_base = gm
  modified_base 11: mod_base = um
  modified_base 12: mod_base = OTHER; note = 2'-fluorouridine
  modified_base 13: mod_base = um
  modified_base 14: mod_base = OTHER; note = 2'-fluorocytidine
  modified_base 15: mod_base = cm
  modified_base 16: mod_base = OTHER; note = 2'-fluoroadenosine
  modified_base 17: mod_base = um
  modified_base 18: mod_base = um
  modified_base 19: mod_base = cm
  modified_base 20: mod_base = cm
  modified_base 20^21: mod_base = OTHER; note = phosphorothioate linkage
  modified_base 21: mod_base = OTHER; note = 2'-O-methyladenosine
  source 1..21: mol_type = other RNA
ttgtgttcagtttccattcca

SEQ ID NO: 600 - RNA, 21 nt, synthetic construct
  modified_base 1: mod_base = OTHER; note = 5 -cyclopropyl phosphonate-2 -O-methyluridine
  modified_base 1^2: mod_base = OTHER; note = phosphorothioate linkage
  modified_base 2: mod_base = OTHER; note = 2'-fluoroadenosine
  modified_base 2^3: mod_base = OTHER; note = phosphorothioate linkage
  modified_base 3: mod_base = cm
  modified_base 3^4: mod_base = OTHER; note = phosphorothioate linkage
  modified_base 4: mod_base = OTHER; note = 2'-fluoroadenosine
  modified_base 5: mod_base = OTHER; note = 2'-O-methyladenosine
  modified_base 6: mod_base = OTHER; note = 2'-fluorouridine
  modified_base 7: mod_base = um
  modified_base 8: mod_base = um
  modified_base 9: mod_base = cm
  modified_base 10: mod_base = um
  modified_base 11: mod_base = gm
  modified_base 12: mod_base = OTHER; note = 2'-fluoroguanosine
  modified_base 13: mod_base = cm
  modified_base 14: mod_base = OTHER; note = 2'-fluorouridine
  modified_base 15: mod_base = um
  modified_base 16: mod_base = OTHER; note = 2'-fluorocytidine
  modified_base 17: mod_base = cm
  modified_base 18: mod_base = OTHER; note = 2'-fluorocytidine
  modified_base 19: mod_base = OTHER; note = 2'-O-methyladenosine
  modified_base 20: mod_base = gm
  modified_base 20^21: mod_base = OTHER; note = phosphorothioate linkage
  modified_base 21: mod_base = gm
  source 1..21: mol_type = other RNA
tacaatttctggcttcccagg

SEQ ID NO: 601 - RNA, 21 nt, synthetic construct
  modified_base 1: mod_base = OTHER; note = 5 -cyclopropyl phosphonate-2 -O-methyluridine
  modified_base 1^2: mod_base = OTHER; note = phosphorothioate linkage
  modified_base 2: mod_base = OTHER; note = 2'-fluorocytidine
  modified_base 2^3: mod_base = OTHER; note = phosphorothioate linkage
  modified_base 3: mod_base = um
  modified_base 3^4: mod_base = OTHER; note = phosphorothioate linkage
  modified_base 4: mod_base = OTHER; note = 2'-fluoroguanosine
  modified_base 5: mod_base = um
  modified_base 6: mod_base = OTHER; note = 2'-fluoroguanosine
  modified_base 7: mod_base = um
  modified_base 8: mod_base = um
  modified_base 9: mod_base = cm
  modified_base 10: mod_base = OTHER; note = 2'-O-methyladenosine
  modified_base 11: mod_base = gm
  modified_base 12: mod_base = OTHER; note = 2'-fluorouridine
  modified_base 13: mod_base = um
  modified_base 14: mod_base = OTHER; note = 2'-fluorouridine
  modified_base 15: mod_base = cm
  modified_base 16: mod_base = OTHER; note = 2'-fluorocytidine
  modified_base 17: mod_base = OTHER; note = 2'-O-methyladenosine
  modified_base 18: mod_base = OTHER; note = 2'-fluorouridine
  modified_base 19: mod_base = um
  modified_base 20: mod_base = cm
  modified_base 20^21: mod_base = OTHER; note = phosphorothioate linkage
  modified_base 21: mod_base = cm
  source 1..21: mol_type = other RNA
tctgtgttcagtttccattcc

SEQ ID NO: 602 - RNA, 21 nt, synthetic construct
  modified_base 1: mod_base = cm
  modified_base 1^2: mod_base = OTHER; note = phosphorothioate linkage
  modified_base 2: mod_base = gm
  modified_base 3: mod_base = gm
  modified_base 4: mod_base = OTHER; note = 2'-O-methyladenosine
  modified_base 5: mod_base = OTHER; note = 2'-O-methyladenosine
  modified_base 6: mod_base = um
  modified_base 7: mod_base = gm
  modified_base 8: mod_base = gm
  modified_base 9: mod_base = OTHER; note = 2'-fluoroadenosine
  modified_base 10: mod_base = OTHER; note = 2'-fluoroadenosine
  modified_base 11: mod_base = OTHER; note = 2'-fluoroadenosine
  modified_base 12: mod_base = cm
  modified_base 13: mod_base = um
  modified_base 14: mod_base = gm
  modified_base 15: mod_base = OTHER; note = 2'-O-methyladenosine
  modified_base 16: mod_base = OTHER; note = 2'-O-methyladenosine
  modified_base 17: mod_base = cm
  modified_base 18: mod_base = OTHER; note = 2'-O-methyladenosine
  modified_base 19: mod_base = cm
  modified_base 20: mod_base = OTHER; note = 2'-O-methyladenosine
  modified_base 21: mod_base = OTHER; note = 2'-O-methyladenosine
  source 1..21: mol_type = other RNA
cggaatggaaactgaacacaa

SEQ ID NO: 603 - RNA, 21 nt, synthetic construct
  modified_base 1: mod_base = gm
  modified_base 1^2: mod_base = OTHER; note = phosphorothioate linkage
  modified_base 2: mod_base = gm
  modified_base 3: mod_base = OTHER; note = 2'-O-methyladenosine
  modified_base 4: mod_base = OTHER; note = 2'-O-methyladenosine
  modified_base 5: mod_base = um
  modified_base 6: mod_base = gm
  modified_base 7: mod_base = gm
  modified_base 8: mod_base = OTHER; note = 2'-O-methyladenosine
  modified_base 9: mod_base = OTHER; note = 2'-fluoroadenosine
  modified_base 10: mod_base = OTHER; note = 2'-fluoroadenosine
  modified_base 11: mod_base = OTHER; note = 2'-fluorocytidine
  modified_base 12: mod_base = um
  modified_base 13: mod_base = gm
  modified_base 14: mod_base = OTHER; note = 2'-O-methyladenosine
  modified_base 15: mod_base = OTHER; note = 2'-O-methyladenosine
  modified_base 16: mod_base = cm
  modified_base 17: mod_base = OTHER; note = 2'-O-methyladenosine
  modified_base 18: mod_base = cm
  modified_base 19: mod_base = OTHER; note = 2'-O-methyladenosine
  modified_base 20: mod_base = OTHER; note = 2 -O-methylinosine
  modified_base 21: mod_base = OTHER; note = 2'-O-methyladenosine
  source 1..21: mol_type = other RNA
ggaatggaaactgaacacana

SEQ ID NO: 604 - RNA, 21 nt, synthetic construct
  modified_base 1: mod_base = OTHER; note = 2'-O-methyladenosine
  modified_base 1^2: mod_base = OTHER; note = phosphorothioate linkage
  modified_base 2: mod_base = cm
  modified_base 3: mod_base = cm
  modified_base 4: mod_base = OTHER; note = 2'-O-methyladenosine
  modified_base 5: mod_base = gm
  modified_base 6: mod_base = OTHER; note = 2'-O-methyladenosine
  modified_base 7: mod_base = um
  modified_base 8: mod_base = um
  modified_base 9: mod_base = OTHER; note = 2'-fluorocytidine
  modified_base 10: mod_base = OTHER; note = 2'-fluorocytidine
  modified_base 11: mod_base = OTHER; note = 2'-fluorouridine
  modified_base 12: mod_base = gm
  modified_base 13: mod_base = gm
  modified_base 14: mod_base = gm
  modified_base 15: mod_base = OTHER; note = 2'-O-methyladenosine
  modified_base 16: mod_base = OTHER; note = 2'-O-methyladenosine
  modified_base 17: mod_base = OTHER; note = 2 -O-methylinosine
  modified_base 18: mod_base = cm
  modified_base 19: mod_base = cm
  modified_base 20: mod_base = OTHER; note = 2'-O-methyladenosine
  modified_base 21: mod_base = OTHER; note = 2'-O-methyladenosine
  source 1..21: mol_type = other RNA
accagattcctgggaanccaa

SEQ ID NO: 605 - RNA, 21 nt, synthetic construct
  modified_base 1: mod_base = um
  modified_base 1^2: mod_base = OTHER; note = phosphorothioate linkage
  modified_base 2: mod_base = cm
  modified_base 3: mod_base = cm
  modified_base 4: mod_base = um
  modified_base 5: mod_base = gm
  modified_base 6: mod_base = gm
  modified_base 7: mod_base = gm
  modified_base 8: mod_base = OTHER; note = 2'-O-methyladenosine
  modified_base 9: mod_base = OTHER; note = 2'-fluoroadenosine
  modified_base 10: mod_base = OTHER; note = 2'-fluoroguanosine
  modified_base 11: mod_base = OTHER; note = 2'-fluorocytidine
  modified_base 12: mod_base = cm
  modified_base 13: mod_base = OTHER; note = 2'-O-methyladenosine
  modified_base 14: mod_base = gm
  modified_base 15: mod_base = OTHER; note = 2'-O-methyladenosine
  modified_base 16: mod_base = OTHER; note = 2'-O-methyladenosine
  modified_base 17: mod_base = OTHER; note = 2'-O-methyladenosine
  modified_base 18: mod_base = um
  modified_base 19: mod_base = um
  modified_base 20: mod_base = gm
  modified_base 21: mod_base = um
  source 1..21: mol_type = other RNA
tcctgggaagccagaaattgt

SEQ ID NO: 606 - RNA, 21 nt, synthetic construct
  modified_base 1: mod_base = gm
  modified_base 1^2: mod_base = OTHER; note = phosphorothioate linkage
  modified_base 2: mod_base = cm
  modified_base 3: mod_base = cm
  modified_base 4: mod_base = OTHER; note = 2'-O-methyladenosine
  modified_base 5: mod_base = cm
  modified_base 6: mod_base = um
  modified_base 7: mod_base = gm
  modified_base 8: mod_base = gm
  modified_base 9: mod_base = OTHER; note = 2'-fluorouridine
  modified_base 10: mod_base = OTHER; note = 2'-fluoroguanosine
  modified_base 11: mod_base = OTHER; note = 2'-fluorocytidine
  modified_base 12: mod_base = um
  modified_base 13: mod_base = gm
  modified_base 14: mod_base = OTHER; note = 2'-O-methyladenosine
  modified_base 15: mod_base = OTHER; note = 2'-O-methyladenosine
  modified_base 16: mod_base = gm
  modified_base 17: mod_base = um
  modified_base 18: mod_base = gm
  modified_base 19: mod_base = um
  modified_base 20: mod_base = OTHER; note = 2'-O-methyladenosine
  modified_base 21: mod_base = OTHER; note = 2'-O-methyladenosine
  source 1..21: mol_type = other RNA
gccactggtgctgaagtgtaa

SEQ ID NO: 607 - RNA, 21 nt, synthetic construct
  modified_base 1: mod_base = cm
  modified_base 1^2: mod_base = OTHER; note = phosphorothioate linkage
  modified_base 2: mod_base = gm
  modified_base 3: mod_base = gm
  modified_base 4: mod_base = OTHER; note = 2'-O-methyladenosine
  modified_base 5: mod_base = cm
  modified_base 6: mod_base = OTHER; note = 2'-O-methyladenosine
  modified_base 7: mod_base = gm
  modified_base 8: mod_base = OTHER; note = 2'-O-methyladenosine
  modified_base 9: mod_base = OTHER; note = 2'-fluoroadenosine
  modified_base 10: mod_base = OTHER; note = 2'-fluoroguanosine
  modified_base 11: mod_base = OTHER; note = 2'-fluorocytidine
  modified_base 12: mod_base = um
  modified_base 13: mod_base = um
  modified_base 14: mod_base = gm
  modified_base 15: mod_base = gm
  modified_base 16: mod_base = OTHER; note = 2'-O-methyladenosine
  modified_base 17: mod_base = OTHER; note = 2'-O-methyladenosine
  modified_base 18: mod_base = gm
  modified_base 19: mod_base = OTHER; note = 2 -O-methylinosine
  modified_base 20: mod_base = um
  modified_base 21: mod_base = OTHER; note = 2'-O-methyladenosine
  source 1..21: mol_type = other RNA
cggacagaagcttggaagnta

SEQ ID NO: 608 - RNA, 21 nt, synthetic construct
  modified_base 1: mod_base = cm
  modified_base 1^2: mod_base = OTHER; note = phosphorothioate linkage
  modified_base 2: mod_base = OTHER; note = 2'-O-methyladenosine
  modified_base 3: mod_base = gm
  modified_base 4: mod_base = gm
  modified_base 5: mod_base = OTHER; note = 2'-O-methyladenosine
  modified_base 6: mod_base = um
  modified_base 7: mod_base = gm
  modified_base 8: mod_base = OTHER; note = 2'-O-methyladenosine
  modified_base 9: mod_base = OTHER; note = 2'-fluoroguanosine
  modified_base 10: mod_base = OTHER; note = 2'-fluoroguanosine
  modified_base 11: mod_base = OTHER; note = 2'-fluoroguanosine
  modified_base 12: mod_base = gm
  modified_base 13: mod_base = OTHER; note = 2'-O-methyladenosine
  modified_base 14: mod_base = um
  modified_base 15: mod_base = um
  modified_base 16: mod_base = um
  modified_base 17: mod_base = um
  modified_base 18: mod_base = cm
  modified_base 19: mod_base = cm
  modified_base 20: mod_base = OTHER; note = 2 -O-methylinosine
  modified_base 21: mod_base = OTHER; note = 2'-O-methyladenosine
  source 1..21: mol_type = other RNA
caggatgaggggattttccna

SEQ ID NO: 609 - RNA, 21 nt, synthetic construct
  modified_base 1: mod_base = OTHER; note = 2'-O-methyladenosine
  modified_base 1^2: mod_base = OTHER; note = phosphorothioate linkage
  modified_base 2: mod_base = gm
  modified_base 3: mod_base = OTHER; note = 2'-O-methyladenosine
  modified_base 4: mod_base = um
  modified_base 5: mod_base = um
  modified_base 6: mod_base = cm
  modified_base 7: mod_base = cm
  modified_base 8: mod_base = um
  modified_base 9: mod_base = OTHER; note = 2'-fluoroguanosine
  modified_base 10: mod_base = OTHER; note = 2'-fluoroguanosine
  modified_base 11: mod_base = OTHER; note = 2'-fluoroguanosine
  modified_base 12: mod_base = OTHER; note = 2'-O-methyladenosine
  modified_base 13: mod_base = OTHER; note = 2'-O-methyladenosine
  modified_base 14: mod_base = gm
  modified_base 15: mod_base = cm
  modified_base 16: mod_base = um
  modified_base 17: mod_base = OTHER; note = 2'-O-methyladenosine
  modified_base 18: mod_base = gm
  modified_base 19: mod_base = OTHER; note = 2'-O-methyladenosine
  modified_base 20: mod_base = OTHER; note = 2'-O-methyladenosine
  modified_base 21: mod_base = OTHER; note = 2'-O-methyladenosine
  source 1..21: mol_type = other RNA
agattcctgggaagctagaaa

SEQ ID NO: 610 - RNA, 21 nt, synthetic construct
  modified_base 1: mod_base = OTHER; note = 2-aminoadenine
  modified_base 1^2: mod_base = OTHER; note = phosphorothioate linkage
  modified_base 2: mod_base = gm
  modified_base 3: mod_base = OTHER; note = 2'-O-methyladenosine
  modified_base 4: mod_base = um
  modified_base 5: mod_base = um
  modified_base 6: mod_base = cm
  modified_base 7: mod_base = um
  modified_base 8: mod_base = gm
  modified_base 9: mod_base = OTHER; note = 2'-fluorocytidine
  modified_base 10: mod_base = OTHER; note = 2'-fluorocytidine
  modified_base 11: mod_base = OTHER; note = 2'-fluorouridine
  modified_base 12: mod_base = cm
  modified_base 13: mod_base = um
  modified_base 14: mod_base = gm
  modified_base 15: mod_base = OTHER; note = 2'-O-methyladenosine
  modified_base 16: mod_base = OTHER; note = 2'-O-methyladenosine
  modified_base 17: mod_base = cm
  modified_base 18: mod_base = um
  modified_base 19: mod_base = cm
  modified_base 20: mod_base = OTHER; note = 2'-O-methyladenosine
  modified_base 21: mod_base = OTHER; note = 2'-O-methyladenosine
  source 1..21: mol_type = other RNA
agattctgcctctgaactcaa

SEQ ID NO: 611 - RNA, 21 nt, synthetic construct
  modified_base 1: mod_base = um
  modified_base 1^2: mod_base = OTHER; note = phosphorothioate linkage
  modified_base 2: mod_base = OTHER; note = 2'-O-methyladenosine
  modified_base 3: mod_base = cm
  modified_base 4: mod_base = cm
  modified_base 5: mod_base = cm
  modified_base 6: mod_base = um
  modified_base 7: mod_base = gm
  modified_base 8: mod_base = cm
  modified_base 9: mod_base = OTHER; note = 2'-fluoroadenosine
  modified_base 10: mod_base = OTHER; note = 2'-fluoroguanosine
  modified_base 11: mod_base = OTHER; note = 2'-fluoroguanosine
  modified_base 12: mod_base = gm
  modified_base 13: mod_base = OTHER; note = 2'-O-methyladenosine
  modified_base 14: mod_base = cm
  modified_base 15: mod_base = um
  modified_base 16: mod_base = cm
  modified_base 17: mod_base = um
  modified_base 18: mod_base = um
  modified_base 19: mod_base = OTHER; note = 2'-O-methyladenosine
  modified_base 20: mod_base = gm
  modified_base 21: mod_base = OTHER; note = 2'-O-methyladenosine
  source 1..21: mol_type = other RNA
taccctgcagggactcttaga

SEQ ID NO: 612 - RNA, 21 nt, synthetic construct
  modified_base 1: mod_base = OTHER; note = 2'-O-methyladenosine
  modified_base 1^2: mod_base = OTHER; note = phosphorothioate linkage
  modified_base 2: mod_base = cm
  modified_base 3: mod_base = cm
  modified_base 4: mod_base = cm
  modified_base 5: mod_base = um
  modified_base 6: mod_base = gm
  modified_base 7: mod_base = cm
  modified_base 8: mod_base = OTHER; note = 2'-O-methyladenosine
  modified_base 9: mod_base = OTHER; note = 2'-fluoroguanosine
  modified_base 10: mod_base = OTHER; note = 2'-fluoroguanosine
  modified_base 11: mod_base = OTHER; note = 2'-fluoroguanosine
  modified_base 12: mod_base = OTHER; note = 2'-O-methyladenosine
  modified_base 13: mod_base = cm
  modified_base 14: mod_base = um
  modified_base 15: mod_base = cm
  modified_base 16: mod_base = um
  modified_base 17: mod_base = um
  modified_base 18: mod_base = OTHER; note = 2'-O-methyladenosine
  modified_base 19: mod_base = OTHER; note = 2 -O-methylinosine
  modified_base 20: mod_base = cm
  modified_base 21: mod_base = um
  source 1..21: mol_type = other RNA
accctgcagggactcttanct

SEQ ID NO: 613 - RNA, 21 nt, synthetic construct
  modified_base 1: mod_base = um
  modified_base 1^2: mod_base = OTHER; note = phosphorothioate linkage
  modified_base 2: mod_base = cm
  modified_base 3: mod_base = cm
  modified_base 4: mod_base = cm
  modified_base 5: mod_base = OTHER; note = 2'-O-methyladenosine
  modified_base 6: mod_base = cm
  modified_base 7: mod_base = cm
  modified_base 8: mod_base = um
  modified_base 9: mod_base = OTHER; note = 2'-fluorouridine
  modified_base 10: mod_base = OTHER; note = 2'-fluorocytidine
  modified_base 11: mod_base = OTHER; note = 2'-fluorouridine
  modified_base 12: mod_base = cm
  modified_base 13: mod_base = cm
  modified_base 14: mod_base = um
  modified_base 15: mod_base = gm
  modified_base 16: mod_base = um
  modified_base 17: mod_base = OTHER; note = 2'-O-methyladenosine
  modified_base 18: mod_base = OTHER; note = 2 -O-methylinosine
  modified_base 19: mod_base = cm
  modified_base 20: mod_base = um
  modified_base 21: mod_base = um
  source 1..21: mol_type = other RNA
tcccaccttctcctgtanctt

SEQ ID NO: 614 - RNA, 21 nt, synthetic construct
  modified_base 1: mod_base = OTHER; note = 2'-O-methyladenosine
  modified_base 1^2: mod_base = OTHER; note = phosphorothioate linkage
  modified_base 2: mod_base = cm
  modified_base 3: mod_base = cm
  modified_base 4: mod_base = um
  modified_base 5: mod_base = um
  modified_base 6: mod_base = cm
  modified_base 7: mod_base = um
  modified_base 8: mod_base = cm
  modified_base 9: mod_base = OTHER; note = 2'-fluorocytidine
  modified_base 10: mod_base = OTHER; note = 2'-fluorouridine
  modified_base 11: mod_base = OTHER; note = 2'-fluoroguanosine
  modified_base 12: mod_base = um
  modified_base 13: mod_base = OTHER; note = 2'-O-methyladenosine
  modified_base 14: mod_base = gm
  modified_base 15: mod_base = cm
  modified_base 16: mod_base = um
  modified_base 17: mod_base = um
  modified_base 18: mod_base = cm
  modified_base 19: mod_base = OTHER; note = 2'-O-methyladenosine
  modified_base 20: mod_base = OTHER; note = 2 -O-methylinosine
  modified_base 21: mod_base = OTHER; note = 2'-O-methyladenosine
  source 1..21: mol_type = other RNA
accttctcctgtagcttcana

SEQ ID NO: 615 - RNA, 21 nt, synthetic construct
  modified_base 1: mod_base = gm
  modified_base 1^2: mod_base = OTHER; note = phosphorothioate linkage
  modified_base 2: mod_base = gm
  modified_base 3: mod_base = um
  modified_base 4: mod_base = gm
  modified_base 5: mod_base = cm
  modified_base 6: mod_base = um
  modified_base 7: mod_base = gm
  modified_base 8: mod_base = gm
  modified_base 9: mod_base = OTHER; note = 2'-fluorouridine
  modified_base 10: mod_base = OTHER; note = 2'-fluorocytidine
  modified_base 11: mod_base = OTHER; note = 2'-fluorocytidine
  modified_base 12: mod_base = um
  modified_base 13: mod_base = cm
  modified_base 14: mod_base = OTHER; note = 2'-O-methyladenosine
  modified_base 15: mod_base = gm
  modified_base 16: mod_base = um
  modified_base 17: mod_base = cm
  modified_base 18: mod_base = um
  modified_base 19: mod_base = OTHER; note = 2 -O-methylinosine
  modified_base 20: mod_base = um
  modified_base 21: mod_base = OTHER; note = 2'-O-methyladenosine
  source 1..21: mol_type = other RNA
ggtgctggtcctcagtctnta

SEQ ID NO: 616 - RNA, 21 nt, synthetic construct
  modified_base 1: mod_base = gm
  modified_base 1^2: mod_base = OTHER; note = phosphorothioate linkage
  modified_base 2: mod_base = gm
  modified_base 3: mod_base = um
  modified_base 4: mod_base = gm
  modified_base 5: mod_base = cm
  modified_base 6: mod_base = um
  modified_base 7: mod_base = gm
  modified_base 8: mod_base = gm
  modified_base 9: mod_base = OTHER; note = 2'-fluorouridine
  modified_base 10: mod_base = OTHER; note = 2'-fluorocytidine
  modified_base 11: mod_base = OTHER; note = 2'-fluorocytidine
  modified_base 12: mod_base = um
  modified_base 13: mod_base = cm
  modified_base 14: mod_base = OTHER; note = 2'-O-methyladenosine
  modified_base 15: mod_base = gm
  modified_base 16: mod_base = um
  modified_base 17: mod_base = cm
  modified_base 18: mod_base = um
  modified_base 19: mod_base = gm
  modified_base 20: mod_base = um
  modified_base 21: mod_base = OTHER; note = 2'-O-methyladenosine
  source 1..21: mol_type = other RNA
ggtgctggtcctcagtctgta

SEQ ID NO: 617 - RNA, 21 nt, synthetic construct
  modified_base 1: mod_base = gm
  modified_base 1^2: mod_base = OTHER; note = phosphorothioate linkage
  modified_base 2: mod_base = um
  modified_base 3: mod_base = gm
  modified_base 4: mod_base = cm
  modified_base 5: mod_base = um
  modified_base 6: mod_base = gm
  modified_base 7: mod_base = gm
  modified_base 8: mod_base = um
  modified_base 9: mod_base = OTHER; note = 2'-fluorocytidine
  modified_base 10: mod_base = OTHER; note = 2'-fluorocytidine
  modified_base 11: mod_base = OTHER; note = 2'-fluorouridine
  modified_base 12: mod_base = cm
  modified_base 13: mod_base = OTHER; note = 2'-O-methyladenosine
  modified_base 14: mod_base = gm
  modified_base 15: mod_base = um
  modified_base 16: mod_base = cm
  modified_base 17: mod_base = um
  modified_base 18: mod_base = gm
  modified_base 19: mod_base = um
  modified_base 20: mod_base = OTHER; note = 2 -O-methylinosine
  modified_base 21: mod_base = OTHER; note = 2'-O-methyladenosine
  source 1..21: mol_type = other RNA
gtgctggtcctcagtctgtna

SEQ ID NO: 618 - RNA, 21 nt, synthetic construct
  modified_base 1: mod_base = gm
  modified_base 1^2: mod_base = OTHER; note = phosphorothioate linkage
  modified_base 2: mod_base = um
  modified_base 3: mod_base = gm
  modified_base 4: mod_base = cm
  modified_base 5: mod_base = um
  modified_base 6: mod_base = gm
  modified_base 7: mod_base = gm
  modified_base 8: mod_base = um
  modified_base 9: mod_base = OTHER; note = 2'-fluorocytidine
  modified_base 10: mod_base = OTHER; note = 2'-fluorocytidine
  modified_base 11: mod_base = OTHER; note = 2'-fluorouridine
  modified_base 12: mod_base = cm
  modified_base 13: mod_base = OTHER; note = 2'-O-methyladenosine
  modified_base 14: mod_base = gm
  modified_base 15: mod_base = um
  modified_base 16: mod_base = cm
  modified_base 17: mod_base = um
  modified_base 18: mod_base = OTHER; note = 2 -O-methylinosine
  modified_base 19: mod_base = um
  modified_base 20: mod_base = gm
  modified_base 21: mod_base = OTHER; note = 2'-O-methyladenosine
  source 1..21: mol_type = other RNA
gtgctggtcctcagtctntga

SEQ ID NO: 619 - RNA, 21 nt, synthetic construct
  modified_base 1: mod_base = cm
  modified_base 1^2: mod_base = OTHER; note = phosphorothioate linkage
  modified_base 2: mod_base = gm
  modified_base 3: mod_base = gm
  modified_base 4: mod_base = OTHER; note = 2'-O-methyladenosine
  modified_base 5: mod_base = OTHER; note = 2'-O-methyladenosine
  modified_base 6: mod_base = um
  modified_base 7: mod_base = gm
  modified_base 8: mod_base = gm
  modified_base 9: mod_base = OTHER; note = 2'-fluoroadenosine
  modified_base 10: mod_base = OTHER; note = 2'-fluoroadenosine
  modified_base 11: mod_base = OTHER; note = 2'-fluoroadenosine
  modified_base 12: mod_base = cm
  modified_base 13: mod_base = um
  modified_base 14: mod_base = gm
  modified_base 15: mod_base = OTHER; note = 2'-O-methyladenosine
  modified_base 16: mod_base = OTHER; note = 2'-O-methyladenosine
  modified_base 17: mod_base = cm
  modified_base 18: mod_base = OTHER; note = 2'-O-methyladenosine
  modified_base 19: mod_base = cm
  modified_base 20: mod_base = OTHER; note = 2'-O-methyladenosine
  modified_base 21: mod_base = OTHER; note = 2'-O-methyladenosine
  source 1..21: mol_type = other RNA
cggaatggaaactgaacacaa

SEQ ID NO: 620 - RNA, 21 nt, synthetic construct
  modified_base 1: mod_base = gm
  modified_base 1^2: mod_base = OTHER; note = phosphorothioate linkage
  modified_base 2: mod_base = gm
  modified_base 3: mod_base = gm
  modified_base 4: mod_base = OTHER; note = 2'-O-methyladenosine
  modified_base 5: mod_base = OTHER; note = 2'-O-methyladenosine
  modified_base 6: mod_base = um
  modified_base 7: mod_base = gm
  modified_base 8: mod_base = gm
  modified_base 9: mod_base = OTHER; note = 2'-fluoroadenosine
  modified_base 10: mod_base = OTHER; note = 2'-fluoroadenosine
  modified_base 11: mod_base = OTHER; note = 2'-fluoroadenosine
  modified_base 12: mod_base = cm
  modified_base 13: mod_base = um
  modified_base 14: mod_base = gm
  modified_base 15: mod_base = OTHER; note = 2'-O-methyladenosine
  modified_base 16: mod_base = OTHER; note = 2'-O-methyladenosine
  modified_base 17: mod_base = cm
  modified_base 18: mod_base = OTHER; note = 2'-O-methyladenosine
  modified_base 19: mod_base = cm
  modified_base 20: mod_base = OTHER; note = 2'-O-methyladenosine
  modified_base 21: mod_base = OTHER; note = 2'-O-methyladenosine
  source 1..21: mol_type = other RNA
gggaatggaaactgaacacaa

SEQ ID NO: 621 - RNA, 21 nt, synthetic construct
  modified_base 1: mod_base = cm
  modified_base 1^2: mod_base = OTHER; note = phosphorothioate linkage
  modified_base 2: mod_base = gm
  modified_base 3: mod_base = gm
  modified_base 4: mod_base = OTHER; note = 2'-O-methyladenosine
  modified_base 5: mod_base = OTHER; note = 2'-O-methyladenosine
  modified_base 6: mod_base = um
  modified_base 7: mod_base = gm
  modified_base 8: mod_base = gm
  modified_base 9: mod_base = OTHER; note = 2'-fluoroadenosine
  modified_base 10: mod_base = OTHER; note = 2'-fluoroadenosine
  modified_base 11: mod_base = OTHER; note = 2'-fluoroadenosine
  modified_base 12: mod_base = cm
  modified_base 13: mod_base = um
  modified_base 14: mod_base = OTHER; note = 2 -O-methylinosine
  modified_base 15: mod_base = OTHER; note = 2'-O-methyladenosine
  modified_base 16: mod_base = OTHER; note = 2'-O-methyladenosine
  modified_base 17: mod_base = cm
  modified_base 18: mod_base = OTHER; note = 2'-O-methyladenosine
  modified_base 19: mod_base = cm
  modified_base 20: mod_base = OTHER; note = 2'-O-methyladenosine
  modified_base 21: mod_base = OTHER; note = 2'-O-methyladenosine
  source 1..21: mol_type = other RNA
cggaatggaaactnaacacaa

SEQ ID NO: 622 - RNA, 21 nt, synthetic construct
  modified_base 1: mod_base = cm
  modified_base 1^2: mod_base = OTHER; note = phosphorothioate linkage
  modified_base 2: mod_base = gm
  modified_base 3: mod_base = gm
  modified_base 4: mod_base = OTHER; note = 2'-O-methyladenosine
  modified_base 5: mod_base = OTHER; note = 2'-O-methyladenosine
  modified_base 6: mod_base = um
  modified_base 7: mod_base = gm
  modified_base 8: mod_base = gm
  modified_base 9: mod_base = OTHER; note = 2'-fluoroadenosine
  modified_base 10: mod_base = OTHER; note = 2-aminoadenine
  modified_base 11: mod_base = OTHER; note = 2'-fluoroadenosine
  modified_base 12: mod_base = cm
  modified_base 13: mod_base = um
  modified_base 14: mod_base = OTHER; note = 2 -O-methylinosine
  modified_base 15: mod_base = OTHER; note = 2'-O-methyladenosine
  modified_base 16: mod_base = OTHER; note = 2'-O-methyladenosine
  modified_base 17: mod_base = cm
  modified_base 18: mod_base = OTHER; note = 2'-O-methyladenosine
  modified_base 19: mod_base = cm
  modified_base 20: mod_base = OTHER; note = 2'-O-methyladenosine
  modified_base 21: mod_base = OTHER; note = 2'-O-methyladenosine
  source 1..21: mol_type = other RNA
cggaatggaaactnaacacaa

SEQ ID NO: 623 - RNA, 21 nt, synthetic construct
  modified_base 1: mod_base = cm
  modified_base 1^2: mod_base = OTHER; note = phosphorothioate linkage
  modified_base 2: mod_base = gm
  modified_base 3: mod_base = gm
  modified_base 4: mod_base = OTHER; note = 2'-O-methyladenosine
  modified_base 5: mod_base = OTHER; note = 2'-O-methyladenosine
  modified_base 6: mod_base = um
  modified_base 7: mod_base = gm
  modified_base 8: mod_base = gm
  modified_base 9: mod_base = OTHER; note = 2'-fluoroadenosine
  modified_base 10: mod_base = OTHER; note = 2'-fluoroadenosine
  modified_base 11: mod_base = OTHER; note = 2'-fluoroadenosine
  modified_base 12: mod_base = cm
  modified_base 13: mod_base = um
  modified_base 14: mod_base = gm
  modified_base 15: mod_base = OTHER; note = 2'-O-methyladenosine
  modified_base 16: mod_base = OTHER; note = 2'-O-methyladenosine
  modified_base 17: mod_base = um
  modified_base 18: mod_base = OTHER; note = 2'-O-methyladenosine
  modified_base 19: mod_base = cm
  modified_base 20: mod_base = OTHER; note = 2'-O-methyladenosine
  modified_base 21: mod_base = OTHER; note = 2'-O-methyladenosine
  source 1..21: mol_type = other RNA
cggaatggaaactgaatacaa

SEQ ID NO: 624 - RNA, 21 nt, synthetic construct
  modified_base 1: mod_base = cm
  modified_base 1^2: mod_base = OTHER; note = phosphorothioate linkage
  modified_base 2: mod_base = gm
  modified_base 3: mod_base = gm
  modified_base 4: mod_base = OTHER; note = 2'-O-methyladenosine
  modified_base 5: mod_base = OTHER; note = 2'-O-methyladenosine
  modified_base 6: mod_base = um
  modified_base 7: mod_base = OTHER; note = 2'-fluoroguanosine
  modified_base 8: mod_base = gm
  modified_base 9: mod_base = OTHER; note = 2'-fluoroadenosine
  modified_base 10: mod_base = OTHER; note = 2'-O-methyladenosine
  modified_base 11: mod_base = OTHER; note = 2'-fluoroadenosine
  modified_base 12: mod_base = cm
  modified_base 13: mod_base = um
  modified_base 14: mod_base = gm
  modified_base 15: mod_base = OTHER; note = 2'-O-methyladenosine
  modified_base 16: mod_base = OTHER; note = 2'-O-methyladenosine
  modified_base 17: mod_base = cm
  modified_base 18: mod_base = OTHER; note = 2'-O-methyladenosine
  modified_base 19: mod_base = cm
  modified_base 20: mod_base = OTHER; note = 2'-O-methyladenosine
  modified_base 21: mod_base = OTHER; note = 2'-O-methyladenosine
  source 1..21: mol_type = other RNA
cggaatggaaactgaacacaa

SEQ ID NO: 625 - RNA, 21 nt, synthetic construct
  modified_base 1: mod_base = um
  modified_base 1^2: mod_base = OTHER; note = phosphorothioate linkage
  modified_base 2: mod_base = cm
  modified_base 3: mod_base = cm
  modified_base 4: mod_base = um
  modified_base 5: mod_base = gm
  modified_base 6: mod_base = gm
  modified_base 7: mod_base = gm
  modified_base 8: mod_base = OTHER; note = 2'-O-methyladenosine
  modified_base 9: mod_base = OTHER; note = 2'-fluoroadenosine
  modified_base 10: mod_base = OTHER; note = 2'-fluoroguanosine
  modified_base 11: mod_base = OTHER; note = 2'-fluorocytidine
  modified_base 12: mod_base = cm
  modified_base 13: mod_base = OTHER; note = 2'-O-methyladenosine
  modified_base 14: mod_base = gm
  modified_base 15: mod_base = OTHER; note = 2'-O-methyladenosine
  modified_base 16: mod_base = OTHER; note = 2'-O-methyladenosine
  modified_base 17: mod_base = OTHER; note = 2'-O-methyladenosine
  modified_base 18: mod_base = um
  modified_base 19: mod_base = um
  modified_base 20: mod_base = gm
  modified_base 21: mod_base = um
  source 1..21: mol_type = other RNA
tcctgggaagccagaaattgt

SEQ ID NO: 626 - RNA, 21 nt, synthetic construct
  modified_base 1: mod_base = gm
  modified_base 1^2: mod_base = OTHER; note = phosphorothioate linkage
  modified_base 2: mod_base = OTHER; note = 2'-O-methyladenosine
  modified_base 3: mod_base = gm
  modified_base 4: mod_base = um
  modified_base 5: mod_base = OTHER; note = 2'-O-methyladenosine
  modified_base 6: mod_base = gm
  modified_base 7: mod_base = gm
  modified_base 8: mod_base = um
  modified_base 9: mod_base = OTHER; note = 2'-fluoroguanosine
  modified_base 10: mod_base = OTHER; note = 2'-fluorocytidine
  modified_base 11: mod_base = OTHER; note = 2'-fluorouridine
  modified_base 12: mod_base = cm
  modified_base 13: mod_base = OTHER; note = 2'-O-methyladenosine
  modified_base 14: mod_base = OTHER; note = 2'-O-methyladenosine
  modified_base 15: mod_base = OTHER; note = 2'-O-methyladenosine
  modified_base 16: mod_base = OTHER; note = 2'-O-methyladenosine
  modified_base 17: mod_base = cm
  modified_base 18: mod_base = OTHER; note = 2'-O-methyladenosine
  modified_base 19: mod_base = um
  modified_base 20: mod_base = cm
  modified_base 21: mod_base = OTHER; note = 2'-O-methyladenosine
  source 1..21: mol_type = other RNA
gagtaggtgctcaaaacatca

SEQ ID NO: 627 - RNA, 21 nt, synthetic construct
  modified_base 1: mod_base = OTHER; note = 2'-O-methyladenosine
  modified_base 1^2: mod_base = OTHER; note = phosphorothioate linkage
  modified_base 2: mod_base = gm
  modified_base 3: mod_base = gm
  modified_base 4: mod_base = cm
  modified_base 5: mod_base = OTHER; note = 2'-O-methyladenosine
  modified_base 6: mod_base = OTHER; note = 2'-O-methyladenosine
  modified_base 7: mod_base = um
  modified_base 8: mod_base = gm
  modified_base 9: mod_base = OTHER; note = 2'-fluoroadenosine
  modified_base 10: mod_base = OTHER; note = 2'-fluoroadenosine
  modified_base 11: mod_base = OTHER; note = 2'-fluorocytidine
  modified_base 12: mod_base = OTHER; note = 2'-O-methyladenosine
  modified_base 13: mod_base = gm
  modified_base 14: mod_base = gm
  modified_base 15: mod_base = OTHER; note = 2'-O-methyladenosine
  modified_base 16: mod_base = OTHER; note = 2'-O-methyladenosine
  modified_base 17: mod_base = um
  modified_base 18: mod_base = OTHER; note = 2 -O-methylinosine
  modified_base 19: mod_base = gm
  modified_base 20: mod_base = OTHER; note = 2'-O-methyladenosine
  modified_base 21: mod_base = OTHER; note = 2'-O-methyladenosine
  source 1..21: mol_type = other RNA
aggcaatgaacaggaatngaa

SEQ ID NO: 628 - RNA, 21 nt, synthetic construct
  modified_base 1: mod_base = OTHER; note = 2'-O-methyladenosine
  modified_base 1^2: mod_base = OTHER; note = phosphorothioate linkage
  modified_base 2: mod_base = gm
  modified_base 3: mod_base = um
  modified_base 4: mod_base = cm
  modified_base 5: mod_base = cm
  modified_base 6: mod_base = gm
  modified_base 7: mod_base = um
  modified_base 8: mod_base = gm
  modified_base 9: mod_base = OTHER; note = 2'-fluorouridine
  modified_base 10: mod_base = OTHER; note = 2'-fluorocytidine
  modified_base 11: mod_base = OTHER; note = 2'-fluorouridine
  modified_base 12: mod_base = OTHER; note = 2'-O-methyladenosine
  modified_base 13: mod_base = cm
  modified_base 14: mod_base = cm
  modified_base 15: mod_base = OTHER; note = 2'-O-methyladenosine
  modified_base 16: mod_base = OTHER; note = 2 -O-methylinosine
  modified_base 17: mod_base = OTHER; note = 2'-O-methyladenosine
  modified_base 18: mod_base = um
  modified_base 19: mod_base = um
  modified_base 20: mod_base = cm
  modified_base 21: mod_base = OTHER; note = 2'-O-methyladenosine
  source 1..21: mol_type = other RNA
agtccgtgtctaccanattca

SEQ ID NO: 629 - RNA, 21 nt, synthetic construct
  modified_base 1: mod_base = um
  modified_base 1^2: mod_base = OTHER; note = phosphorothioate linkage
  modified_base 2: mod_base = cm
  modified_base 3: mod_base = cm
  modified_base 4: mod_base = gm
  modified_base 5: mod_base = um
  modified_base 6: mod_base = gm
  modified_base 7: mod_base = um
  modified_base 8: mod_base = cm
  modified_base 9: mod_base = OTHER; note = 2'-fluorouridine
  modified_base 10: mod_base = OTHER; note = 2'-fluoroadenosine
  modified_base 11: mod_base = OTHER; note = 2'-fluorocytidine
  modified_base 12: mod_base = cm
  modified_base 13: mod_base = OTHER; note = 2'-O-methyladenosine
  modified_base 14: mod_base = gm
  modified_base 15: mod_base = OTHER; note = 2'-O-methyladenosine
  modified_base 16: mod_base = um
  modified_base 17: mod_base = um
  modified_base 18: mod_base = cm
  modified_base 19: mod_base = cm
  modified_base 20: mod_base = um
  modified_base 21: mod_base = OTHER; note = 2'-O-methyladenosine
  source 1..21: mol_type = other RNA
tccgtgtctaccagattccta

SEQ ID NO: 630 - RNA, 21 nt, synthetic construct
  modified_base 1: mod_base = cm
  modified_base 1^2: mod_base = OTHER; note = phosphorothioate linkage
  modified_base 2: mod_base = cm
  modified_base 3: mod_base = cm
  modified_base 4: mod_base = OTHER; note = 2'-O-methyladenosine
  modified_base 5: mod_base = cm
  modified_base 6: mod_base = cm
  modified_base 7: mod_base = um
  modified_base 8: mod_base = um
  modified_base 9: mod_base = OTHER; note = 2'-fluorocytidine
  modified_base 10: mod_base = OTHER; note = 2'-fluorouridine
  modified_base 11: mod_base = OTHER; note = 2'-fluorocytidine
  modified_base 12: mod_base = cm
  modified_base 13: mod_base = um
  modified_base 14: mod_base = gm
  modified_base 15: mod_base = um
  modified_base 16: mod_base = OTHER; note = 2'-O-methyladenosine
  modified_base 17: mod_base = OTHER; note = 2 -O-methylinosine
  modified_base 18: mod_base = cm
  modified_base 19: mod_base = um
  modified_base 20: mod_base = um
  modified_base 21: mod_base = OTHER; note = 2'-O-methyladenosine
  source 1..21: mol_type = other RNA
cccaccttctcctgtanctta

SEQ ID NO: 631 - RNA, 21 nt, synthetic construct
  modified_base 1: mod_base = cm
  modified_base 1^2: mod_base = OTHER; note = phosphorothioate linkage
  modified_base 2: mod_base = um
  modified_base 3: mod_base = cm
  modified_base 4: mod_base = cm
  modified_base 5: mod_base = um
  modified_base 6: mod_base = cm
  modified_base 7: mod_base = OTHER; note = 2'-O-methyladenosine
  modified_base 8: mod_base = OTHER; note = 2'-O-methyladenosine
  modified_base 9: mod_base = OTHER; note = 2'-fluoroadenosine
  modified_base 10: mod_base = OTHER; note = 2'-fluorouridine
  modified_base 11: mod_base = OTHER; note = 2'-fluorocytidine
  modified_base 12: mod_base = cm
  modified_base 13: mod_base = OTHER; note = 2'-O-methyladenosine
  modified_base 14: mod_base = cm
  modified_base 15: mod_base = um
  modified_base 16: mod_base = OTHER; note = 2 -O-methylinosine
  modified_base 17: mod_base = gm
  modified_base 18: mod_base = OTHER; note = 2'-O-methyladenosine
  modified_base 19: mod_base = um
  modified_base 20: mod_base = gm
  modified_base 21: mod_base = OTHER; note = 2'-O-methyladenosine
  source 1..21: mol_type = other RNA
ctcctcaaatccactngatga

SEQ ID NO: 632 - RNA, 21 nt, synthetic construct
  modified_base 1: mod_base = gm
  modified_base 1^2: mod_base = OTHER; note = phosphorothioate linkage
  modified_base 2: mod_base = gm
  modified_base 3: mod_base = um
  modified_base 4: mod_base = OTHER; note = 2'-O-methyladenosine
  modified_base 5: mod_base = gm
  modified_base 6: mod_base = OTHER; note = 2'-O-methyladenosine
  modified_base 7: mod_base = um
  modified_base 8: mod_base = um
  modified_base 9: mod_base = OTHER; note = 2'-fluorocytidine
  modified_base 10: mod_base = OTHER; note = 2'-fluorouridine
  modified_base 11: mod_base = OTHER; note = 2'-fluoroguanosine
  modified_base 12: mod_base = cm
  modified_base 13: mod_base = cm
  modified_base 14: mod_base = um
  modified_base 15: mod_base = cm
  modified_base 16: mod_base = um
  modified_base 17: mod_base = OTHER; note = 2 -O-methylinosine
  modified_base 18: mod_base = OTHER; note = 2'-O-methyladenosine
  modified_base 19: mod_base = OTHER; note = 2'-O-methyladenosine
  modified_base 20: mod_base = cm
  modified_base 21: mod_base = um
  source 1..21: mol_type = other RNA
ggtagattctgcctctnaact

SEQ ID NO: 633 - RNA, 21 nt, synthetic construct
  modified_base 1: mod_base = um
  modified_base 1^2: mod_base = OTHER; note = phosphorothioate linkage
  modified_base 2: mod_base = OTHER; note = 2'-O-methyladenosine
  modified_base 3: mod_base = gm
  modified_base 4: mod_base = OTHER; note = 2'-O-methyladenosine
  modified_base 5: mod_base = um
  modified_base 6: mod_base = um
  modified_base 7: mod_base = cm
  modified_base 8: mod_base = um
  modified_base 9: mod_base = OTHER; note = 2'-fluoroguanosine
  modified_base 10: mod_base = OTHER; note = 2'-fluorocytidine
  modified_base 11: mod_base = OTHER; note = 2'-fluorocytidine
  modified_base 12: mod_base = um
  modified_base 13: mod_base = cm
  modified_base 14: mod_base = um
  modified_base 15: mod_base = gm
  modified_base 16: mod_base = OTHER; note = 2'-O-methyladenosine
  modified_base 17: mod_base = OTHER; note = 2'-O-methyladenosine
  modified_base 18: mod_base = cm
  modified_base 19: mod_base = um
  modified_base 20: mod_base = cm
  modified_base 21: mod_base = OTHER; note = 2'-O-methyladenosine
  source 1..21: mol_type = other RNA
tagattctgcctctgaactca

SEQ ID NO: 634 - RNA, 21 nt, synthetic construct
  modified_base 1: mod_base = gm
  modified_base 1^2: mod_base = OTHER; note = phosphorothioate linkage
  modified_base 2: mod_base = gm
  modified_base 3: mod_base = cm
  modified_base 4: mod_base = um
  modified_base 5: mod_base = gm
  modified_base 6: mod_base = gm
  modified_base 7: mod_base = um
  modified_base 8: mod_base = gm
  modified_base 9: mod_base = OTHER; note = 2'-fluorouridine
  modified_base 10: mod_base = OTHER; note = 2'-fluorouridine
  modified_base 11: mod_base = OTHER; note = 2'-fluorocytidine
  modified_base 12: mod_base = cm
  modified_base 13: mod_base = cm
  modified_base 14: mod_base = OTHER; note = 2'-O-methyladenosine
  modified_base 15: mod_base = OTHER; note = 2'-O-methyladenosine
  modified_base 16: mod_base = um
  modified_base 17: mod_base = OTHER; note = 2'-O-methyladenosine
  modified_base 18: mod_base = OTHER; note = 2'-O-methyladenosine
  modified_base 19: mod_base = gm
  modified_base 20: mod_base = gm
  modified_base 21: mod_base = um
  source 1..21: mol_type = other RNA
ggctggtgttcccaataaggt

SEQ ID NO: 635 - RNA, 21 nt, synthetic construct
  modified_base 1: mod_base = cm
  modified_base 1^2: mod_base = OTHER; note = phosphorothioate linkage
  modified_base 2: mod_base = um
  modified_base 3: mod_base = gm
  modified_base 4: mod_base = gm
  modified_base 5: mod_base = um
  modified_base 6: mod_base = gm
  modified_base 7: mod_base = um
  modified_base 8: mod_base = um
  modified_base 9: mod_base = OTHER; note = 2'-fluorocytidine
  modified_base 10: mod_base = OTHER; note = 2'-fluorocytidine
  modified_base 11: mod_base = OTHER; note = 2'-fluorocytidine
  modified_base 12: mod_base = OTHER; note = 2'-O-methyladenosine
  modified_base 13: mod_base = OTHER; note = 2'-O-methyladenosine
  modified_base 14: mod_base = um
  modified_base 15: mod_base = OTHER; note = 2'-O-methyladenosine
  modified_base 16: mod_base = OTHER; note = 2'-O-methyladenosine
  modified_base 17: mod_base = gm
  modified_base 18: mod_base = OTHER; note = 2 -O-methylinosine
  modified_base 19: mod_base = um
  modified_base 20: mod_base = gm
  modified_base 21: mod_base = OTHER; note = 2'-O-methyladenosine
  source 1..21: mol_type = other RNA
ctggtgttcccaataagntga

SEQ ID NO: 636 - RNA, 21 nt, synthetic construct
  modified_base 1: mod_base = gm
  modified_base 1^2: mod_base = OTHER; note = phosphorothioate linkage
  modified_base 2: mod_base = cm
  modified_base 3: mod_base = um
  modified_base 4: mod_base = um
  modified_base 5: mod_base = OTHER; note = 2'-O-methyladenosine
  modified_base 6: mod_base = gm
  modified_base 7: mod_base = cm
  modified_base 8: mod_base = um
  modified_base 9: mod_base = OTHER; note = 2'-fluoroguanosine
  modified_base 10: mod_base = OTHER; note = 2'-fluoroguanosine
  modified_base 11: mod_base = OTHER; note = 2'-fluorocytidine
  modified_base 12: mod_base = OTHER; note = 2'-O-methyladenosine
  modified_base 13: mod_base = cm
  modified_base 14: mod_base = um
  modified_base 15: mod_base = um
  modified_base 16: mod_base = OTHER; note = 2 -O-methylinosine
  modified_base 17: mod_base = gm
  modified_base 18: mod_base = OTHER; note = 2'-O-methyladenosine
  modified_base 19: mod_base = um
  modified_base 20: mod_base = gm
  modified_base 21: mod_base = OTHER; note = 2'-O-methyladenosine
  source 1..21: mol_type = other RNA
gcttagctggcacttngatga

SEQ ID NO: 637 - RNA, 21 nt, synthetic construct
  modified_base 1: mod_base = cm
  modified_base 1^2: mod_base = OTHER; note = phosphorothioate linkage
  modified_base 2: mod_base = cm
  modified_base 3: mod_base = um
  modified_base 4: mod_base = OTHER; note = 2'-O-methyladenosine
  modified_base 5: mod_base = OTHER; note = 2'-O-methyladenosine
  modified_base 6: mod_base = um
  modified_base 7: mod_base = gm
  modified_base 8: mod_base = OTHER; note = 2'-O-methyladenosine
  modified_base 9: mod_base = OTHER; note = 2'-fluoroguanosine
  modified_base 10: mod_base = OTHER; note = 2'-fluoroadenosine
  modified_base 11: mod_base = OTHER; note = 2'-fluoroadenosine
  modified_base 12: mod_base = gm
  modified_base 13: mod_base = gm
  modified_base 14: mod_base = gm
  modified_base 15: mod_base = OTHER; note = 2'-O-methyladenosine
  modified_base 16: mod_base = OTHER; note = 2 -O-methylinosine
  modified_base 17: mod_base = um
  modified_base 18: mod_base = OTHER; note = 2'-O-methyladenosine
  modified_base 19: mod_base = um
  modified_base 20: mod_base = cm
  modified_base 21: mod_base = um
  source 1..21: mol_type = other RNA
cctaatgagaagggantatct

SEQ ID NO: 638 - RNA, 21 nt, synthetic construct
  modified_base 1: mod_base = gm
  modified_base 1^2: mod_base = OTHER; note = phosphorothioate linkage
  modified_base 2: mod_base = um
  modified_base 3: mod_base = gm
  modified_base 4: mod_base = OTHER; note = 2'-O-methyladenosine
  modified_base 5: mod_base = gm
  modified_base 6: mod_base = OTHER; note = 2'-O-methyladenosine
  modified_base 7: mod_base = OTHER; note = 2'-O-methyladenosine
  modified_base 8: mod_base = gm
  modified_base 9: mod_base = OTHER; note = 2'-fluoroguanosine
  modified_base 10: mod_base = OTHER; note = 2'-fluoroguanosine
  modified_base 11: mod_base = OTHER; note = 2'-fluoroadenosine
  modified_base 12: mod_base = gm
  modified_base 13: mod_base = um
  modified_base 14: mod_base = OTHER; note = 2'-O-methyladenosine
  modified_base 15: mod_base = um
  modified_base 16: mod_base = cm
  modified_base 17: mod_base = um
  modified_base 18: mod_base = OTHER; note = 2 -O-methylinosine
  modified_base 19: mod_base = um
  modified_base 20: mod_base = gm
  modified_base 21: mod_base = OTHER; note = 2'-O-methyladenosine
  source 1..21: mol_type = other RNA
gtgagaagggagtatctntga

SEQ ID NO: 639 - RNA, 21 nt, synthetic construct
  modified_base 1: mod_base = cm
  modified_base 1^2: mod_base = OTHER; note = phosphorothioate linkage
  modified_base 2: mod_base = OTHER; note = 2'-O-methyladenosine
  modified_base 3: mod_base = gm
  modified_base 4: mod_base = cm
  modified_base 5: mod_base = OTHER; note = 2'-O-methyladenosine
  modified_base 6: mod_base = um
  modified_base 7: mod_base = cm
  modified_base 8: mod_base = OTHER; note = 2'-O-methyladenosine
  modified_base 9: mod_base = OTHER; note = 2'-fluoroguanosine
  modified_base 10: mod_base = OTHER; note = 2'-fluorocytidine
  modified_base 11: mod_base = OTHER; note = 2'-fluoroadenosine
  modified_base 12: mod_base = um
  modified_base 13: mod_base = cm
  modified_base 14: mod_base = OTHER; note = 2'-O-methyladenosine
  modified_base 15: mod_base = um
  modified_base 16: mod_base = cm
  modified_base 17: mod_base = OTHER; note = 2 -O-methylinosine
  modified_base 18: mod_base = OTHER; note = 2'-O-methyladenosine
  modified_base 19: mod_base = OTHER; note = 2'-O-methyladenosine
  modified_base 20: mod_base = cm
  modified_base 21: mod_base = OTHER; note = 2'-O-methyladenosine
  source 1..21: mol_type = other RNA
cagcatcagcatcatcnaaca

SEQ ID NO: 640 - RNA, 21 nt, synthetic construct
  modified_base 1: mod_base = cm
  modified_base 2: mod_base = gm
  modified_base 3: mod_base = gm
  modified_base 4: mod_base = OTHER; note = 2'-O-methyladenosine
  modified_base 5: mod_base = OTHER; note = 2'-O-methyladenosine
  modified_base 6: mod_base = um
  modified_base 7: mod_base = gm
  modified_base 8: mod_base = gm
  modified_base 9: mod_base = OTHER; note = 2'-fluoroadenosine
  modified_base 10: mod_base = OTHER; note = 2'-fluoroadenosine
  modified_base 11: mod_base = OTHER; note = 2'-fluoroadenosine
  modified_base 12: mod_base = cm
  modified_base 13: mod_base = um
  modified_base 14: mod_base = gm
  modified_base 15: mod_base = OTHER; note = 2'-O-methyladenosine
  modified_base 16: mod_base = OTHER; note = 2'-O-methyladenosine
  modified_base 17: mod_base = cm
  modified_base 18: mod_base = OTHER; note = 2'-O-methyladenosine
  modified_base 19: mod_base = cm
  modified_base 20: mod_base = OTHER; note = 2'-O-methyladenosine
  modified_base 21: mod_base = OTHER; note = 2'-O-methyladenosine
  source 1..21: mol_type = other RNA
cggaatggaaactgaacacaa

SEQ ID NO: 641 - RNA, 21 nt, synthetic construct
  modified_base 1: mod_base = cm
  modified_base 1^2: mod_base = OTHER; note = phosphorothioate linkage
  modified_base 2: mod_base = gm
  modified_base 3: mod_base = gm
  modified_base 4: mod_base = OTHER; note = 2'-O-methyladenosine
  modified_base 5: mod_base = OTHER; note = 2'-O-methyladenosine
  modified_base 6: mod_base = um
  modified_base 7: mod_base = gm
  modified_base 8: mod_base = gm
  modified_base 9: mod_base = OTHER; note = 2'-fluoroadenosine
  modified_base 10: mod_base = OTHER; note = 2'-fluoroadenosine
  modified_base 11: mod_base = OTHER; note = 2'-fluoroadenosine
  modified_base 12: mod_base = cm
  modified_base 13: mod_base = um
  modified_base 14: mod_base = gm
  modified_base 15: mod_base = OTHER; note = 2'-O-methyladenosine
  modified_base 16: mod_base = OTHER; note = 2'-O-methyladenosine
  modified_base 17: mod_base = cm
  modified_base 18: mod_base = OTHER; note = 2'-O-methyladenosine
  modified_base 19: mod_base = cm
  modified_base 20: mod_base = OTHER; note = 2'-O-methyladenosine
  modified_base 21: mod_base = OTHER; note = 2'-O-methyladenosine
  source 1..21: mol_type = other RNA
cggaatggaaactgaacacaa

SEQ ID NO: 642 - RNA, 21 nt, synthetic construct
  modified_base 1: mod_base = cm
  modified_base 2: mod_base = gm
  modified_base 3: mod_base = gm
  modified_base 4: mod_base = OTHER; note = 2'-O-methyladenosine
  modified_base 5: mod_base = OTHER; note = 2'-O-methyladenosine
  modified_base 6: mod_base = um
  modified_base 7: mod_base = gm
  modified_base 8: mod_base = gm
  modified_base 9: mod_base = OTHER; note = 2'-fluoroadenosine
  modified_base 10: mod_base = OTHER; note = 2'-fluoroadenosine
  modified_base 11: mod_base = OTHER; note = 2'-fluoroadenosine
  modified_base 12: mod_base = cm
  modified_base 13: mod_base = um
  modified_base 14: mod_base = gm
  modified_base 15: mod_base = OTHER; note = 2'-O-methyladenosine
  modified_base 16: mod_base = OTHER; note = 2'-O-methyladenosine
  modified_base 17: mod_base = cm
  modified_base 18: mod_base = OTHER; note = 2'-O-methyladenosine
  modified_base 19: mod_base = cm
  modified_base 20: mod_base = OTHER; note = 2'-O-methyladenosine
  modified_base 21: mod_base = OTHER; note = 2'-O-methyladenosine
  source 1..21: mol_type = other RNA
cggaatggaaactgaacacaa

SEQ ID NO: 643 - RNA, 21 nt, synthetic construct
  modified_base 1: mod_base = cm
  modified_base 1^2: mod_base = OTHER; note = phosphorothioate linkage
  modified_base 2: mod_base = gm
  modified_base 3: mod_base = gm
  modified_base 4: mod_base = OTHER; note = 2'-O-methyladenosine
  modified_base 5: mod_base = OTHER; note = 2'-O-methyladenosine
  modified_base 6: mod_base = um
  modified_base 7: mod_base = OTHER; note = 2'-fluoroguanosine
  modified_base 8: mod_base = gm
  modified_base 9: mod_base = OTHER; note = 2'-fluoroadenosine
  modified_base 10: mod_base = OTHER; note = 2'-O-methyladenosine
  modified_base 11: mod_base = OTHER; note = 2'-fluoroadenosine
  modified_base 12: mod_base = cm
  modified_base 13: mod_base = um
  modified_base 14: mod_base = gm
  modified_base 15: mod_base = OTHER; note = 2'-O-methyladenosine
  modified_base 16: mod_base = OTHER; note = 2'-O-methyladenosine
  modified_base 17: mod_base = um
  modified_base 18: mod_base = OTHER; note = 2'-O-methyladenosine
  modified_base 19: mod_base = cm
  modified_base 20: mod_base = OTHER; note = 2'-O-methyladenosine
  modified_base 21: mod_base = OTHER; note = 2'-O-methyladenosine
  source 1..21: mol_type = other RNA
cggaatggaaactgaatacaa

SEQ ID NO: 644 - RNA, 21 nt, synthetic construct
  modified_base 1: mod_base = gm
  modified_base 1^2: mod_base = OTHER; note = phosphorothioate linkage
  modified_base 2: mod_base = gm
  modified_base 3: mod_base = gm
  modified_base 4: mod_base = OTHER; note = 2'-O-methyladenosine
  modified_base 5: mod_base = OTHER; note = 2'-O-methyladenosine
  modified_base 6: mod_base = um
  modified_base 7: mod_base = OTHER; note = 2'-fluoroguanosine
  modified_base 8: mod_base = gm
  modified_base 9: mod_base = OTHER; note = 2'-fluoroadenosine
  modified_base 10: mod_base = OTHER; note = 2'-O-methyladenosine
  modified_base 11: mod_base = OTHER; note = 2'-fluoroadenosine
  modified_base 12: mod_base = cm
  modified_base 13: mod_base = um
  modified_base 14: mod_base = gm
  modified_base 15: mod_base = OTHER; note = 2'-O-methyladenosine
  modified_base 16: mod_base = OTHER; note = 2'-O-methyladenosine
  modified_base 17: mod_base = cm
  modified_base 18: mod_base = OTHER; note = 2'-O-methyladenosine
  modified_base 19: mod_base = cm
  modified_base 20: mod_base = OTHER; note = 2'-O-methyladenosine
  modified_base 21: mod_base = OTHER; note = 2'-O-methyladenosine
  source 1..21: mol_type = other RNA
gggaatggaaactgaacacaa

SEQ ID NO: 645 - RNA, 21 nt, synthetic construct
  modified_base 1: mod_base = um
  modified_base 1^2: mod_base = OTHER; note = phosphorothioate linkage
  modified_base 2: mod_base = gm
  modified_base 3: mod_base = gm
  modified_base 4: mod_base = OTHER; note = 2'-O-methyladenosine
  modified_base 5: mod_base = OTHER; note = 2'-O-methyladenosine
  modified_base 6: mod_base = um
  modified_base 7: mod_base = OTHER; note = 2'-fluoroguanosine
  modified_base 8: mod_base = gm
  modified_base 9: mod_base = OTHER; note = 2'-fluoroadenosine
  modified_base 10: mod_base = OTHER; note = 2'-O-methyladenosine
  modified_base 11: mod_base = OTHER; note = 2'-fluoroadenosine
  modified_base 12: mod_base = cm
  modified_base 13: mod_base = um
  modified_base 14: mod_base = gm
  modified_base 15: mod_base = OTHER; note = 2'-O-methyladenosine
  modified_base 16: mod_base = OTHER; note = 2'-O-methyladenosine
  modified_base 17: mod_base = cm
  modified_base 18: mod_base = OTHER; note = 2'-O-methyladenosine
  modified_base 19: mod_base = cm
  modified_base 20: mod_base = OTHER; note = 2'-O-methyladenosine
  modified_base 21: mod_base = OTHER; note = 2'-O-methyladenosine
  source 1..21: mol_type = other RNA
tggaatggaaactgaacacaa

SEQ ID NO: 646 - RNA, 21 nt, synthetic construct
  modified_base 1: mod_base = cm
  modified_base 1^2: mod_base = OTHER; note = phosphorothioate linkage
  modified_base 2: mod_base = gm
  modified_base 3: mod_base = gm
  modified_base 4: mod_base = OTHER; note = 2'-O-methyladenosine
  modified_base 5: mod_base = OTHER; note = 2'-O-methyladenosine
  modified_base 6: mod_base = um
  modified_base 7: mod_base = OTHER; note = 2'-fluoroguanosine
  modified_base 8: mod_base = gm
  modified_base 9: mod_base = OTHER; note = 2'-fluoroadenosine
  modified_base 10: mod_base = OTHER; note = 2-aminoadenine
  modified_base 11: mod_base = OTHER; note = 2'-fluoroadenosine
  modified_base 12: mod_base = cm
  modified_base 13: mod_base = um
  modified_base 14: mod_base = gm
  modified_base 15: mod_base = OTHER; note = 2'-O-methyladenosine
  modified_base 16: mod_base = OTHER; note = 2'-O-methyladenosine
  modified_base 17: mod_base = cm
  modified_base 18: mod_base = OTHER; note = 2'-O-methyladenosine
  modified_base 19: mod_base = cm
  modified_base 20: mod_base = OTHER; note = 2'-O-methyladenosine
  modified_base 21: mod_base = OTHER; note = 2'-O-methyladenosine
  source 1..21: mol_type = other RNA
cggaatggaaactgaacacaa

SEQ ID NO: 647 - RNA, 21 nt, synthetic construct
  modified_base 1: mod_base = cm
  modified_base 2: mod_base = gm
  modified_base 3: mod_base = gm
  modified_base 4: mod_base = OTHER; note = 2'-O-methyladenosine
  modified_base 5: mod_base = OTHER; note = 2'-O-methyladenosine
  modified_base 6: mod_base = um
  modified_base 7: mod_base = gm
  modified_base 8: mod_base = gm
  modified_base 9: mod_base = OTHER; note = 2'-fluoroadenosine
  modified_base 10: mod_base = OTHER; note = 2'-fluoroadenosine
  modified_base 11: mod_base = OTHER; note = 2'-fluoroadenosine
  modified_base 12: mod_base = cm
  modified_base 13: mod_base = um
  modified_base 14: mod_base = gm
  modified_base 15: mod_base = OTHER; note = 2'-O-methyladenosine
  modified_base 16: mod_base = OTHER; note = 2'-O-methyladenosine
  modified_base 17: mod_base = cm
  modified_base 18: mod_base = OTHER; note = 2'-O-methyladenosine
  modified_base 19: mod_base = cm
  modified_base 20: mod_base = OTHER; note = 2'-O-methyladenosine
  modified_base 21: mod_base = OTHER; note = 2'-O-methyladenosine
  source 1..21: mol_type = other RNA
cggaatggaaactgaacacaa

SEQ ID NO: 648 - RNA, 21 nt, synthetic construct
  modified_base 1: mod_base = cm
  modified_base 1^2: mod_base = OTHER; note = phosphorothioate linkage
  modified_base 2: mod_base = gm
  modified_base 3: mod_base = gm
  modified_base 4: mod_base = OTHER; note = 2'-O-methyladenosine
  modified_base 5: mod_base = OTHER; note = 2'-O-methyladenosine
  modified_base 6: mod_base = um
  modified_base 7: mod_base = gm
  modified_base 8: mod_base = gm
  modified_base 9: mod_base = OTHER; note = 2'-fluoroadenosine
  modified_base 10: mod_base = OTHER; note = 2'-fluoroadenosine
  modified_base 11: mod_base = OTHER; note = 2'-fluoroadenosine
  modified_base 12: mod_base = cm
  modified_base 13: mod_base = um
  modified_base 14: mod_base = gm
  modified_base 15: mod_base = OTHER; note = 2'-O-methyladenosine
  modified_base 16: mod_base = OTHER; note = 2'-O-methyladenosine
  modified_base 17: mod_base = cm
  modified_base 18: mod_base = OTHER; note = 2'-O-methyladenosine
  modified_base 19: mod_base = cm
  modified_base 20: mod_base = OTHER; note = 2'-O-methyladenosine
  modified_base 21: mod_base = OTHER; note = 2'-O-methyladenosine
  source 1..21: mol_type = other RNA
cggaatggaaactgaacacaa

SEQ ID NO: 649 - RNA, 21 nt, synthetic construct
  modified_base 1: mod_base = cm
  modified_base 1^2: mod_base = OTHER; note = phosphorothioate linkage
  modified_base 2: mod_base = gm
  modified_base 3: mod_base = gm
  modified_base 4: mod_base = OTHER; note = 2'-O-methyladenosine
  modified_base 5: mod_base = OTHER; note = 2'-O-methyladenosine
  modified_base 6: mod_base = um
  modified_base 7: mod_base = gm
  modified_base 8: mod_base = gm
  modified_base 9: mod_base = OTHER; note = 2'-fluoroadenosine
  modified_base 10: mod_base = OTHER; note = 2'-fluoroadenosine
  modified_base 11: mod_base = OTHER; note = 2'-fluoroadenosine
  modified_base 12: mod_base = cm
  modified_base 13: mod_base = um
  modified_base 14: mod_base = gm
  modified_base 15: mod_base = OTHER; note = 2'-O-methyladenosine
  modified_base 16: mod_base = OTHER; note = 2'-O-methyladenosine
  modified_base 17: mod_base = cm
  modified_base 18: mod_base = OTHER; note = 2'-O-methyladenosine
  modified_base 19: mod_base = cm
  modified_base 20: mod_base = OTHER; note = 2'-O-methyladenosine
  modified_base 21: mod_base = OTHER; note = 2'-O-methyladenosine
  source 1..21: mol_type = other RNA
cggaatggaaactgaacacaa

SEQ ID NO: 650 - RNA, 21 nt, synthetic construct
  modified_base 1: mod_base = cm
  modified_base 2: mod_base = gm
  modified_base 3: mod_base = gm
  modified_base 4: mod_base = OTHER; note = 2'-O-methyladenosine
  modified_base 5: mod_base = OTHER; note = 2'-O-methyladenosine
  modified_base 6: mod_base = um
  modified_base 7: mod_base = gm
  modified_base 8: mod_base = gm
  modified_base 9: mod_base = OTHER; note = 2'-fluoroadenosine
  modified_base 10: mod_base = OTHER; note = 2'-fluoroadenosine
  modified_base 11: mod_base = OTHER; note = 2'-fluoroadenosine
  modified_base 12: mod_base = cm
  modified_base 13: mod_base = um
  modified_base 14: mod_base = gm
  modified_base 15: mod_base = OTHER; note = 2'-O-methyladenosine
  modified_base 16: mod_base = OTHER; note = 2'-O-methyladenosine
  modified_base 17: mod_base = cm
  modified_base 18: mod_base = OTHER; note = 2'-O-methyladenosine
  modified_base 19: mod_base = cm
  modified_base 20: mod_base = OTHER; note = 2'-O-methyladenosine
  modified_base 21: mod_base = OTHER; note = 2'-O-methyladenosine
  source 1..21: mol_type = other RNA
cggaatggaaactgaacacaa

SEQ ID NO: 651 - RNA, 21 nt, synthetic construct
  modified_base 1: mod_base = cm
  modified_base 1^2: mod_base = OTHER; note = phosphorothioate linkage
  modified_base 2: mod_base = gm
  modified_base 3: mod_base = gm
  modified_base 4: mod_base = OTHER; note = 2'-O-methyladenosine
  modified_base 5: mod_base = OTHER; note = 2'-O-methyladenosine
  modified_base 6: mod_base = um
  modified_base 7: mod_base = gm
  modified_base 8: mod_base = gm
  modified_base 9: mod_base = OTHER; note = 2'-fluoroadenosine
  modified_base 10: mod_base = OTHER; note = 2'-fluoroadenosine
  modified_base 11: mod_base = OTHER; note = 2'-fluoroadenosine
  modified_base 12: mod_base = cm
  modified_base 13: mod_base = um
  modified_base 14: mod_base = gm
  modified_base 15: mod_base = OTHER; note = 2'-O-methyladenosine
  modified_base 16: mod_base = OTHER; note = 2'-O-methyladenosine
  modified_base 17: mod_base = cm
  modified_base 18: mod_base = OTHER; note = 2'-O-methyladenosine
  modified_base 19: mod_base = cm
  modified_base 20: mod_base = OTHER; note = 2'-O-methyladenosine
  modified_base 21: mod_base = OTHER; note = 2'-O-methyladenosine
  source 1..21: mol_type = other RNA
cggaatggaaactgaacacaa

SEQ ID NO: 652 - RNA, 21 nt, synthetic construct
  modified_base 1: mod_base = cm
  modified_base 2: mod_base = gm
  modified_base 3: mod_base = gm
  modified_base 4: mod_base = OTHER; note = 2'-O-methyladenosine
  modified_base 5: mod_base = OTHER; note = 2'-O-methyladenosine
  modified_base 6: mod_base = um
  modified_base 7: mod_base = gm
  modified_base 8: mod_base = gm
  modified_base 9: mod_base = OTHER; note = 2'-fluoroadenosine
  modified_base 10: mod_base = OTHER; note = 2'-fluoroadenosine
  modified_base 11: mod_base = OTHER; note = 2'-fluoroadenosine
  modified_base 12: mod_base = cm
  modified_base 13: mod_base = um
  modified_base 14: mod_base = gm
  modified_base 15: mod_base = OTHER; note = 2'-O-methyladenosine
  modified_base 16: mod_base = OTHER; note = 2'-O-methyladenosine
  modified_base 17: mod_base = cm
  modified_base 18: mod_base = OTHER; note = 2'-O-methyladenosine
  modified_base 19: mod_base = cm
  modified_base 20: mod_base = OTHER; note = 2'-O-methyladenosine
  modified_base 21: mod_base = OTHER; note = 2'-O-methyladenosine
  source 1..21: mol_type = other RNA
cggaatggaaactgaacacaa

SEQ ID NO: 653 - RNA, 21 nt, synthetic construct
  modified_base 1: mod_base = gm
  modified_base 1^2: mod_base = OTHER; note = phosphorothioate linkage
  modified_base 2: mod_base = OTHER; note = 2'-O-methyladenosine
  modified_base 3: mod_base = um
  modified_base 4: mod_base = gm
  modified_base 5: mod_base = OTHER; note = 2'-O-methyladenosine
  modified_base 6: mod_base = OTHER; note = 2'-O-methyladenosine
  modified_base 7: mod_base = cm
  modified_base 8: mod_base = OTHER; note = 2'-O-methyladenosine
  modified_base 9: mod_base = OTHER; note = 2'-fluoroguanosine
  modified_base 10: mod_base = OTHER; note = 2'-fluoroguanosine
  modified_base 11: mod_base = OTHER; note = 2'-fluoroadenosine
  modified_base 12: mod_base = OTHER; note = 2'-O-methyladenosine
  modified_base 13: mod_base = um
  modified_base 14: mod_base = gm
  modified_base 15: mod_base = gm
  modified_base 16: mod_base = OTHER; note = 2'-O-methyladenosine
  modified_base 17: mod_base = OTHER; note = 2'-O-methyladenosine
  modified_base 18: mod_base = OTHER; note = 2'-O-methyladenosine
  modified_base 19: mod_base = gm
  modified_base 20: mod_base = gm
  modified_base 21: mod_base = OTHER; note = 2'-O-methyladenosine
  source 1..21: mol_type = other RNA
gatgaacaggaatggaaagga

SEQ ID NO: 654 - RNA, 21 nt, synthetic construct
  modified_base 1: mod_base = gm
  modified_base 1^2: mod_base = OTHER; note = phosphorothioate linkage
  modified_base 2: mod_base = OTHER; note = 2'-O-methyladenosine
  modified_base 3: mod_base = um
  modified_base 4: mod_base = gm
  modified_base 5: mod_base = OTHER; note = 2'-O-methyladenosine
  modified_base 6: mod_base = OTHER; note = 2'-O-methyladenosine
  modified_base 7: mod_base = cm
  modified_base 8: mod_base = OTHER; note = 2'-O-methyladenosine
  modified_base 9: mod_base = OTHER; note = 2'-fluoroguanosine
  modified_base 10: mod_base = OTHER; note = 2'-fluoroguanosine
  modified_base 11: mod_base = OTHER; note = 2'-fluoroadenosine
  modified_base 12: mod_base = OTHER; note = 2'-O-methyladenosine
  modified_base 13: mod_base = um
  modified_base 14: mod_base = gm
  modified_base 15: mod_base = gm
  modified_base 16: mod_base = OTHER; note = 2'-O-methyladenosine
  modified_base 17: mod_base = OTHER; note = 2'-O-methyladenosine
  modified_base 18: mod_base = OTHER; note = 2'-O-methyladenosine
  modified_base 19: mod_base = gm
  modified_base 20: mod_base = OTHER; note = 2 -O-methylinosine
  modified_base 21: mod_base = OTHER; note = 2'-O-methyladenosine
  source 1..21: mol_type = other RNA
gatgaacaggaatggaaagna

SEQ ID NO: 655 - RNA, 21 nt, synthetic construct
  modified_base 1: mod_base = gm
  modified_base 1^2: mod_base = OTHER; note = phosphorothioate linkage
  modified_base 2: mod_base = OTHER; note = 2'-O-methyladenosine
  modified_base 3: mod_base = cm
  modified_base 4: mod_base = um
  modified_base 5: mod_base = OTHER; note = 2'-O-methyladenosine
  modified_base 6: mod_base = cm
  modified_base 7: mod_base = cm
  modified_base 8: mod_base = gm
  modified_base 9: mod_base = OTHER; note = 2'-fluoroadenosine
  modified_base 10: mod_base = OTHER; note = 2'-fluoroguanosine
  modified_base 11: mod_base = OTHER; note = 2'-fluorouridine
  modified_base 12: mod_base = cm
  modified_base 13: mod_base = cm
  modified_base 14: mod_base = gm
  modified_base 15: mod_base = um
  modified_base 16: mod_base = gm
  modified_base 17: mod_base = um
  modified_base 18: mod_base = cm
  modified_base 19: mod_base = um
  modified_base 20: mod_base = OTHER; note = 2'-O-methyladenosine
  modified_base 21: mod_base = OTHER; note = 2'-O-methyladenosine
  source 1..21: mol_type = other RNA
gactaccgagtccgtgtctaa

SEQ ID NO: 656 - RNA, 21 nt, synthetic construct
  modified_base 1: mod_base = um
  modified_base 1^2: mod_base = OTHER; note = phosphorothioate linkage
  modified_base 2: mod_base = gm
  modified_base 3: mod_base = cm
  modified_base 4: mod_base = cm
  modified_base 5: mod_base = um
  modified_base 6: mod_base = OTHER; note = 2'-O-methyladenosine
  modified_base 7: mod_base = OTHER; note = 2'-O-methyladenosine
  modified_base 8: mod_base = um
  modified_base 9: mod_base = OTHER; note = 2'-fluoroguanosine
  modified_base 10: mod_base = OTHER; note = 2'-fluoroadenosine
  modified_base 11: mod_base = OTHER; note = 2'-fluoroguanosine
  modified_base 12: mod_base = OTHER; note = 2'-O-methyladenosine
  modified_base 13: mod_base = OTHER; note = 2'-O-methyladenosine
  modified_base 14: mod_base = gm
  modified_base 15: mod_base = gm
  modified_base 16: mod_base = gm
  modified_base 17: mod_base = OTHER; note = 2'-O-methyladenosine
  modified_base 18: mod_base = gm
  modified_base 19: mod_base = um
  modified_base 20: mod_base = OTHER; note = 2'-O-methyladenosine
  modified_base 21: mod_base = um
  source 1..21: mol_type = other RNA
tgcctaatgagaagggagtat

SEQ ID NO: 657 - RNA, 21 nt, synthetic construct
  modified_base 1: mod_base = gm
  modified_base 1^2: mod_base = OTHER; note = phosphorothioate linkage
  modified_base 2: mod_base = OTHER; note = 2'-O-methyladenosine
  modified_base 3: mod_base = gm
  modified_base 4: mod_base = um
  modified_base 5: mod_base = OTHER; note = 2'-O-methyladenosine
  modified_base 6: mod_base = gm
  modified_base 7: mod_base = gm
  modified_base 8: mod_base = um
  modified_base 9: mod_base = OTHER; note = 2'-fluoroguanosine
  modified_base 10: mod_base = cm
  modified_base 11: mod_base = OTHER; note = 2'-fluorouridine
  modified_base 12: mod_base = cm
  modified_base 13: mod_base = OTHER; note = 2'-fluoroadenosine
  modified_base 14: mod_base = OTHER; note = 2'-O-methyladenosine
  modified_base 15: mod_base = OTHER; note = 2'-O-methyladenosine
  modified_base 16: mod_base = OTHER; note = 2'-O-methyladenosine
  modified_base 17: mod_base = cm
  modified_base 18: mod_base = OTHER; note = 2'-O-methyladenosine
  modified_base 19: mod_base = um
  modified_base 20: mod_base = cm
  modified_base 21: mod_base = OTHER; note = 2'-O-methyladenosine
  source 1..21: mol_type = other RNA
gagtaggtgctcaaaacatca

SEQ ID NO: 658 - RNA, 21 nt, synthetic construct
  modified_base 1: mod_base = gm
  modified_base 1^2: mod_base = OTHER; note = phosphorothioate linkage
  modified_base 2: mod_base = OTHER; note = 2'-O-methyladenosine
  modified_base 3: mod_base = gm
  modified_base 4: mod_base = um
  modified_base 5: mod_base = OTHER; note = 2'-O-methyladenosine
  modified_base 6: mod_base = gm
  modified_base 7: mod_base = OTHER; note = 2 -O-methylinosine
  modified_base 8: mod_base = um
  modified_base 9: mod_base = OTHER; note = 2'-fluoroguanosine
  modified_base 10: mod_base = cm
  modified_base 11: mod_base = OTHER; note = 2'-fluorouridine
  modified_base 12: mod_base = cm
  modified_base 13: mod_base = OTHER; note = 2'-fluoroadenosine
  modified_base 14: mod_base = OTHER; note = 2'-O-methyladenosine
  modified_base 15: mod_base = OTHER; note = 2'-O-methyladenosine
  modified_base 16: mod_base = OTHER; note = 2'-O-methyladenosine
  modified_base 17: mod_base = cm
  modified_base 18: mod_base = OTHER; note = 2'-O-methyladenosine
  modified_base 19: mod_base = um
  modified_base 20: mod_base = cm
  modified_base 21: mod_base = OTHER; note = 2'-O-methyladenosine
  source 1..21: mol_type = other RNA
gagtagntgctcaaaacatca

SEQ ID NO: 659 - RNA, 21 nt, synthetic construct
  modified_base 1: mod_base = gm
  modified_base 1^2: mod_base = OTHER; note = phosphorothioate linkage
  modified_base 2: mod_base = OTHER; note = 2'-O-methyladenosine
  modified_base 3: mod_base = gm
  modified_base 4: mod_base = um
  modified_base 5: mod_base = OTHER; note = 2'-O-methyladenosine
  modified_base 6: mod_base = gm
  modified_base 7: mod_base = OTHER; note = 2'-fluoroguanosine
  modified_base 8: mod_base = um
  modified_base 9: mod_base = OTHER; note = 2'-fluoroguanosine
  modified_base 10: mod_base = cm
  modified_base 11: mod_base = OTHER; note = 2'-fluorouridine
  modified_base 12: mod_base = cm
  modified_base 13: mod_base = OTHER; note = 2'-O-methyladenosine
  modified_base 14: mod_base = OTHER; note = 2'-O-methyladenosine
  modified_base 15: mod_base = OTHER; note = 2'-O-methyladenosine
  modified_base 16: mod_base = OTHER; note = 2'-O-methyladenosine
  modified_base 17: mod_base = cm
  modified_base 18: mod_base = OTHER; note = 2'-O-methyladenosine
  modified_base 19: mod_base = um
  modified_base 20: mod_base = cm
  modified_base 21: mod_base = OTHER; note = 2'-O-methyladenosine
  source 1..21: mol_type = other RNA
gagtaggtgctcaaaacatca

SEQ ID NO: 660 - RNA, 21 nt, synthetic construct
  modified_base 1: mod_base = gm
  modified_base 1^2: mod_base = OTHER; note = phosphorothioate linkage
  modified_base 2: mod_base = OTHER; note = 2'-O-methyladenosine
  modified_base 3: mod_base = gm
  modified_base 4: mod_base = um
  modified_base 5: mod_base = OTHER; note = 2'-O-methyladenosine
  modified_base 6: mod_base = gm
  modified_base 7: mod_base = gm
  modified_base 8: mod_base = um
  modified_base 9: mod_base = OTHER; note = 2'-fluoroguanosine
  modified_base 10: mod_base = cm
  modified_base 11: mod_base = OTHER; note = 2'-fluorouridine
  modified_base 12: mod_base = cm
  modified_base 13: mod_base = OTHER; note = 2'-O-methyladenosine
  modified_base 14: mod_base = OTHER; note = 2'-O-methyladenosine
  modified_base 15: mod_base = OTHER; note = 2'-O-methyladenosine
  modified_base 16: mod_base = OTHER; note = 2'-O-methyladenosine
  modified_base 17: mod_base = cm
  modified_base 18: mod_base = OTHER; note = 2'-O-methyladenosine
  modified_base 19: mod_base = um
  modified_base 20: mod_base = cm
  modified_base 21: mod_base = OTHER; note = 2'-O-methyladenosine
  source 1..21: mol_type = other RNA
gagtaggtgctcaaaacatca

SEQ ID NO: 661 - RNA, 21 nt, synthetic construct
  modified_base 1: mod_base = OTHER; note = 2'-O-methyladenosine
  modified_base 1^2: mod_base = OTHER; note = phosphorothioate linkage
  modified_base 2: mod_base = gm
  modified_base 3: mod_base = gm
  modified_base 4: mod_base = cm
  modified_base 5: mod_base = OTHER; note = 2'-O-methyladenosine
  modified_base 6: mod_base = OTHER; note = 2'-O-methyladenosine
  modified_base 7: mod_base = OTHER; note = 2'-fluorouridine
  modified_base 8: mod_base = gm
  modified_base 9: mod_base = OTHER; note = 2'-fluoroadenosine
  modified_base 10: mod_base = OTHER; note = 2'-O-methyladenosine
  modified_base 11: mod_base = OTHER; note = 2'-fluorocytidine
  modified_base 12: mod_base = OTHER; note = 2'-O-methyladenosine
  modified_base 13: mod_base = gm
  modified_base 14: mod_base = gm
  modified_base 15: mod_base = OTHER; note = 2'-O-methyladenosine
  modified_base 16: mod_base = OTHER; note = 2'-O-methyladenosine
  modified_base 17: mod_base = um
  modified_base 18: mod_base = OTHER; note = 2 -O-methylinosine
  modified_base 19: mod_base = gm
  modified_base 20: mod_base = OTHER; note = 2'-O-methyladenosine
  modified_base 21: mod_base = OTHER; note = 2'-O-methyladenosine
  source 1..21: mol_type = other RNA
aggcaatgaacaggaatngaa

SEQ ID NO: 662 - RNA, 21 nt, synthetic construct
  modified_base 1: mod_base = OTHER; note = 2'-O-methyladenosine
  modified_base 1^2: mod_base = OTHER; note = phosphorothioate linkage
  modified_base 2: mod_base = gm
  modified_base 3: mod_base = gm
  modified_base 4: mod_base = cm
  modified_base 5: mod_base = OTHER; note = 2'-O-methyladenosine
  modified_base 6: mod_base = OTHER; note = 2'-O-methyladenosine
  modified_base 7: mod_base = OTHER; note = 2'-fluorouridine
  modified_base 8: mod_base = gm
  modified_base 9: mod_base = OTHER; note = 2'-fluoroadenosine
  modified_base 10: mod_base = OTHER; note = 2'-O-methyladenosine
  modified_base 11: mod_base = OTHER; note = 2'-fluorocytidine
  modified_base 12: mod_base = OTHER; note = 2'-O-methyladenosine
  modified_base 13: mod_base = gm
  modified_base 14: mod_base = gm
  modified_base 15: mod_base = OTHER; note = 2'-O-methyladenosine
  modified_base 16: mod_base = OTHER; note = 2'-O-methyladenosine
  modified_base 17: mod_base = um
  modified_base 18: mod_base = gm
  modified_base 19: mod_base = gm
  modified_base 20: mod_base = OTHER; note = 2'-O-methyladenosine
  modified_base 21: mod_base = OTHER; note = 2'-O-methyladenosine
  source 1..21: mol_type = other RNA
aggcaatgaacaggaatggaa

SEQ ID NO: 663 - RNA, 21 nt, synthetic construct
  modified_base 1: mod_base = OTHER; note = 2'-O-methyladenosine
  modified_base 1^2: mod_base = OTHER; note = phosphorothioate linkage
  modified_base 2: mod_base = gm
  modified_base 3: mod_base = gm
  modified_base 4: mod_base = cm
  modified_base 5: mod_base = OTHER; note = 2'-O-methyladenosine
  modified_base 6: mod_base = OTHER; note = 2'-O-methyladenosine
  modified_base 7: mod_base = OTHER; note = 2'-fluorouridine
  modified_base 8: mod_base = gm
  modified_base 9: mod_base = OTHER; note = 2'-fluoroadenosine
  modified_base 10: mod_base = OTHER; note = 2'-O-methyladenosine
  modified_base 11: mod_base = OTHER; note = 2'-fluorocytidine
  modified_base 12: mod_base = OTHER; note = 2'-O-methyladenosine
  modified_base 13: mod_base = gm
  modified_base 14: mod_base = gm
  modified_base 15: mod_base = OTHER; note = 2'-O-methyladenosine
  modified_base 16: mod_base = OTHER; note = 2'-O-methyladenosine
  modified_base 17: mod_base = um
  modified_base 18: mod_base = gm
  modified_base 19: mod_base = OTHER; note = 2 -O-methylinosine
  modified_base 20: mod_base = OTHER; note = 2'-O-methyladenosine
  modified_base 21: mod_base = OTHER; note = 2'-O-methyladenosine
  source 1..21: mol_type = other RNA
aggcaatgaacaggaatgnaa

SEQ ID NO: 664 - RNA, 21 nt, synthetic construct
  modified_base 1: mod_base = OTHER; note = 2'-O-methyladenosine
  modified_base 1^2: mod_base = OTHER; note = phosphorothioate linkage
  modified_base 2: mod_base = gm
  modified_base 3: mod_base = gm
  modified_base 4: mod_base = cm
  modified_base 5: mod_base = OTHER; note = 2'-O-methyladenosine
  modified_base 6: mod_base = OTHER; note = 2'-O-methyladenosine
  modified_base 7: mod_base = OTHER; note = 2'-fluorouridine
  modified_base 8: mod_base = gm
  modified_base 9: mod_base = OTHER; note = 2'-fluoroadenosine
  modified_base 10: mod_base = OTHER; note = 2'-O-methyladenosine
  modified_base 11: mod_base = OTHER; note = 2'-fluorocytidine
  modified_base 12: mod_base = OTHER; note = 2'-O-methyladenosine
  modified_base 13: mod_base = gm
  modified_base 14: mod_base = OTHER; note = 2 -O-methylinosine
  modified_base 15: mod_base = OTHER; note = 2'-O-methyladenosine
  modified_base 16: mod_base = OTHER; note = 2'-O-methyladenosine
  modified_base 17: mod_base = um
  modified_base 18: mod_base = gm
  modified_base 19: mod_base = gm
  modified_base 20: mod_base = OTHER; note = 2'-O-methyladenosine
  modified_base 21: mod_base = OTHER; note = 2'-O-methyladenosine
  source 1..21: mol_type = other RNA
aggcaatgaacagnaatggaa

SEQ ID NO: 665 - RNA, 21 nt, synthetic construct
  modified_base 1: mod_base = OTHER; note = 2'-O-methyladenosine
  modified_base 1^2: mod_base = OTHER; note = phosphorothioate linkage
  modified_base 2: mod_base = gm
  modified_base 3: mod_base = gm
  modified_base 4: mod_base = cm
  modified_base 5: mod_base = OTHER; note = 2'-O-methyladenosine
  modified_base 6: mod_base = OTHER; note = 2'-O-methyladenosine
  modified_base 7: mod_base = OTHER; note = 2'-fluorouridine
  modified_base 8: mod_base = gm
  modified_base 9: mod_base = OTHER; note = 2'-fluoroadenosine
  modified_base 10: mod_base = OTHER; note = 2'-O-methyladenosine
  modified_base 11: mod_base = OTHER; note = 2'-fluorocytidine
  modified_base 12: mod_base = OTHER; note = 2'-O-methyladenosine
  modified_base 13: mod_base = OTHER; note = 2 -O-methylinosine
  modified_base 14: mod_base = gm
  modified_base 15: mod_base = OTHER; note = 2'-O-methyladenosine
  modified_base 16: mod_base = OTHER; note = 2'-O-methyladenosine
  modified_base 17: mod_base = um
  modified_base 18: mod_base = gm
  modified_base 19: mod_base = gm
  modified_base 20: mod_base = OTHER; note = 2'-O-methyladenosine
  modified_base 21: mod_base = OTHER; note = 2'-O-methyladenosine
  source 1..21: mol_type = other RNA
aggcaatgaacangaatggaa

SEQ ID NO: 666 - RNA, 21 nt, synthetic construct
  modified_base 1: mod_base = gm
  modified_base 1^2: mod_base = OTHER; note = phosphorothioate linkage
  modified_base 2: mod_base = gm
  modified_base 3: mod_base = gm
  modified_base 4: mod_base = cm
  modified_base 5: mod_base = OTHER; note = 2'-O-methyladenosine
  modified_base 6: mod_base = OTHER; note = 2'-O-methyladenosine
  modified_base 7: mod_base = OTHER; note = 2'-fluorouridine
  modified_base 8: mod_base = gm
  modified_base 9: mod_base = OTHER; note = 2'-fluoroadenosine
  modified_base 10: mod_base = OTHER; note = 2'-O-methyladenosine
  modified_base 11: mod_base = OTHER; note = 2'-fluorocytidine
  modified_base 12: mod_base = OTHER; note = 2'-O-methyladenosine
  modified_base 13: mod_base = gm
  modified_base 14: mod_base = gm
  modified_base 15: mod_base = OTHER; note = 2'-O-methyladenosine
  modified_base 16: mod_base = OTHER; note = 2'-O-methyladenosine
  modified_base 17: mod_base = um
  modified_base 18: mod_base = OTHER; note = 2 -O-methylinosine
  modified_base 19: mod_base = gm
  modified_base 20: mod_base = OTHER; note = 2'-O-methyladenosine
  modified_base 21: mod_base = OTHER; note = 2'-O-methyladenosine
  source 1..21: mol_type = other RNA
gggcaatgaacaggaatngaa

SEQ ID NO: 667 - RNA, 21 nt, synthetic construct
  modified_base 1: mod_base = cm
  modified_base 1^2: mod_base = OTHER; note = phosphorothioate linkage
  modified_base 2: mod_base = OTHER; note = 2'-O-methyladenosine
  modified_base 3: mod_base = gm
  modified_base 4: mod_base = um
  modified_base 5: mod_base = OTHER; note = 2'-O-methyladenosine
  modified_base 6: mod_base = gm
  modified_base 7: mod_base = OTHER; note = 2'-fluoroguanosine
  modified_base 8: mod_base = um
  modified_base 9: mod_base = OTHER; note = 2'-fluoroguanosine
  modified_base 10: mod_base = cm
  modified_base 11: mod_base = OTHER; note = 2'-fluorouridine
  modified_base 12: mod_base = cm
  modified_base 13: mod_base = OTHER; note = 2'-O-methyladenosine
  modified_base 14: mod_base = OTHER; note = 2'-O-methyladenosine
  modified_base 15: mod_base = OTHER; note = 2'-O-methyladenosine
  modified_base 16: mod_base = OTHER; note = 2'-O-methyladenosine
  modified_base 17: mod_base = cm
  modified_base 18: mod_base = OTHER; note = 2'-O-methyladenosine
  modified_base 19: mod_base = um
  modified_base 20: mod_base = cm
  modified_base 21: mod_base = OTHER; note = 2'-O-methyladenosine
  source 1..21: mol_type = other RNA
cagtaggtgctcaaaacatca

SEQ ID NO: 668 - RNA, 21 nt, synthetic construct
  modified_base 1: mod_base = um
  modified_base 1^2: mod_base = OTHER; note = phosphorothioate linkage
  modified_base 2: mod_base = OTHER; note = 2-aminoadenine
  modified_base 3: mod_base = gm
  modified_base 4: mod_base = um
  modified_base 5: mod_base = OTHER; note = 2'-O-methyladenosine
  modified_base 6: mod_base = gm
  modified_base 7: mod_base = OTHER; note = 2'-fluoroguanosine
  modified_base 8: mod_base = um
  modified_base 9: mod_base = OTHER; note = 2'-fluoroguanosine
  modified_base 10: mod_base = cm
  modified_base 11: mod_base = OTHER; note = 2'-fluorouridine
  modified_base 12: mod_base = cm
  modified_base 13: mod_base = OTHER; note = 2'-O-methyladenosine
  modified_base 14: mod_base = OTHER; note = 2'-O-methyladenosine
  modified_base 15: mod_base = OTHER; note = 2'-O-methyladenosine
  modified_base 16: mod_base = OTHER; note = 2'-O-methyladenosine
  modified_base 17: mod_base = cm
  modified_base 18: mod_base = OTHER; note = 2'-O-methyladenosine
  modified_base 19: mod_base = um
  modified_base 20: mod_base = cm
  modified_base 21: mod_base = OTHER; note = 2'-O-methyladenosine
  source 1..21: mol_type = other RNA
tagtaggtgctcaaaacatca

SEQ ID NO: 669 - RNA, 21 nt, synthetic construct
  modified_base 1: mod_base = gm
  modified_base 1^2: mod_base = OTHER; note = phosphorothioate linkage
  modified_base 2: mod_base = OTHER; note = 2'-O-methyladenosine
  modified_base 3: mod_base = gm
  modified_base 4: mod_base = um
  modified_base 5: mod_base = OTHER; note = 2'-O-methyladenosine
  modified_base 6: mod_base = gm
  modified_base 7: mod_base = gm
  modified_base 8: mod_base = um
  modified_base 9: mod_base = OTHER; note = 2'-fluoroguanosine
  modified_base 10: mod_base = cm
  modified_base 11: mod_base = OTHER; note = 2'-fluorouridine
  modified_base 12: mod_base = OTHER; note = 2'-fluorocytidine
  modified_base 13: mod_base = OTHER; note = 2'-O-methyladenosine
  modified_base 14: mod_base = OTHER; note = 2'-O-methyladenosine
  modified_base 15: mod_base = OTHER; note = 2'-O-methyladenosine
  modified_base 16: mod_base = OTHER; note = 2'-O-methyladenosine
  modified_base 17: mod_base = cm
  modified_base 18: mod_base = OTHER; note = 2'-O-methyladenosine
  modified_base 19: mod_base = um
  modified_base 20: mod_base = cm
  modified_base 21: mod_base = OTHER; note = 2'-O-methyladenosine
  source 1..21: mol_type = other RNA
gagtaggtgctcaaaacatca

SEQ ID NO: 670 - RNA, 21 nt, synthetic construct
  modified_base 1: mod_base = OTHER; note = 2'-O-methyladenosine
  modified_base 1^2: mod_base = OTHER; note = phosphorothioate linkage
  modified_base 2: mod_base = gm
  modified_base 3: mod_base = gm
  modified_base 4: mod_base = cm
  modified_base 5: mod_base = OTHER; note = 2'-O-methyladenosine
  modified_base 6: mod_base = OTHER; note = 2'-O-methyladenosine
  modified_base 7: mod_base = um
  modified_base 8: mod_base = gm
  modified_base 9: mod_base = OTHER; note = 2'-fluoroadenosine
  modified_base 10: mod_base = OTHER; note = 2'-fluoroadenosine
  modified_base 11: mod_base = OTHER; note = 2'-fluorocytidine
  modified_base 12: mod_base = OTHER; note = 2'-O-methyladenosine
  modified_base 13: mod_base = gm
  modified_base 14: mod_base = gm
  modified_base 15: mod_base = OTHER; note = 2'-O-methyladenosine
  modified_base 16: mod_base = OTHER; note = 2'-O-methyladenosine
  modified_base 17: mod_base = um
  modified_base 18: mod_base = gm
  modified_base 19: mod_base = gm
  modified_base 20: mod_base = OTHER; note = 2'-O-methyladenosine
  modified_base 21: mod_base = OTHER; note = 2'-O-methyladenosine
  source 1..21: mol_type = other RNA
aggcaatgaacaggaatggaa

SEQ ID NO: 671 - RNA, 21 nt, synthetic construct
  modified_base 1: mod_base = gm
  modified_base 1^2: mod_base = OTHER; note = phosphorothioate linkage
  modified_base 2: mod_base = OTHER; note = 2'-O-methyladenosine
  modified_base 3: mod_base = gm
  modified_base 4: mod_base = um
  modified_base 5: mod_base = OTHER; note = 2'-O-methyladenosine
  modified_base 6: mod_base = gm
  modified_base 7: mod_base = OTHER; note = 2'-fluoroguanosine
  modified_base 8: mod_base = um
  modified_base 9: mod_base = OTHER; note = 2'-fluoroguanosine
  modified_base 10: mod_base = cm
  modified_base 11: mod_base = OTHER; note = 2'-fluorouridine
  modified_base 12: mod_base = cm
  modified_base 13: mod_base = OTHER; note = 2'-O-methyladenosine
  modified_base 14: mod_base = OTHER; note = 2'-O-methyladenosine
  modified_base 15: mod_base = OTHER; note = 2'-O-methyladenosine
  modified_base 16: mod_base = OTHER; note = 2'-O-methyladenosine
  modified_base 17: mod_base = cm
  modified_base 18: mod_base = OTHER; note = 2'-O-methyladenosine
  modified_base 19: mod_base = um
  modified_base 20: mod_base = cm
  modified_base 21: mod_base = OTHER; note = 2'-O-methyladenosine
  source 1..21: mol_type = other RNA
gagtaggtgctcaaaacatca

SEQ ID NO: 672 - RNA, 21 nt, synthetic construct
  modified_base 1: mod_base = OTHER; note = 2'-O-methyladenosine
  modified_base 1^2: mod_base = OTHER; note = phosphorothioate linkage
  modified_base 2: mod_base = gm
  modified_base 3: mod_base = gm
  modified_base 4: mod_base = cm
  modified_base 5: mod_base = OTHER; note = 2'-O-methyladenosine
  modified_base 6: mod_base = OTHER; note = 2'-O-methyladenosine
  modified_base 7: mod_base = um
  modified_base 8: mod_base = gm
  modified_base 9: mod_base = OTHER; note = 2'-fluoroadenosine
  modified_base 10: mod_base = OTHER; note = 2'-fluoroadenosine
  modified_base 11: mod_base = OTHER; note = 2'-fluorocytidine
  modified_base 12: mod_base = OTHER; note = 2'-O-methyladenosine
  modified_base 13: mod_base = gm
  modified_base 14: mod_base = gm
  modified_base 15: mod_base = OTHER; note = 2'-O-methyladenosine
  modified_base 16: mod_base = OTHER; note = 2'-O-methyladenosine
  modified_base 17: mod_base = um
  modified_base 18: mod_base = OTHER; note = 2 -O-methylinosine
  modified_base 19: mod_base = gm
  modified_base 20: mod_base = OTHER; note = 2'-O-methyladenosine
  modified_base 21: mod_base = OTHER; note = 2'-O-methyladenosine
  source 1..21: mol_type = other RNA
aggcaatgaacaggaatngaa

SEQ ID NO: 673 - RNA, 21 nt, synthetic construct
  modified_base 1: mod_base = cm
  modified_base 1^2: mod_base = OTHER; note = phosphorothioate linkage
  modified_base 2: mod_base = gm
  modified_base 3: mod_base = gm
  modified_base 4: mod_base = OTHER; note = 2'-O-methyladenosine
  modified_base 5: mod_base = OTHER; note = 2'-O-methyladenosine
  modified_base 6: mod_base = um
  modified_base 7: mod_base = gm
  modified_base 8: mod_base = gm
  modified_base 9: mod_base = OTHER; note = 2'-fluoroadenosine
  modified_base 10: mod_base = OTHER; note = 2'-fluoroadenosine
  modified_base 11: mod_base = OTHER; note = 2'-fluoroadenosine
  modified_base 12: mod_base = cm
  modified_base 13: mod_base = um
  modified_base 14: mod_base = gm
  modified_base 15: mod_base = OTHER; note = 2'-O-methyladenosine
  modified_base 16: mod_base = OTHER; note = 2'-O-methyladenosine
  modified_base 17: mod_base = cm
  modified_base 18: mod_base = OTHER; note = 2'-O-methyladenosine
  modified_base 19: mod_base = cm
  modified_base 20: mod_base = OTHER; note = 2'-O-methyladenosine
  modified_base 21: mod_base = OTHER; note = 2'-O-methyladenosine
  source 1..21: mol_type = other RNA
cggaatggaaactgaacacaa

SEQ ID NO: 674 - RNA, 21 nt, synthetic construct
  modified_base 1: mod_base = cm
  modified_base 1^2: mod_base = OTHER; note = phosphorothioate linkage
  modified_base 2: mod_base = gm
  modified_base 3: mod_base = gm
  modified_base 4: mod_base = OTHER; note = 2'-O-methyladenosine
  modified_base 5: mod_base = OTHER; note = 2'-O-methyladenosine
  modified_base 6: mod_base = um
  modified_base 7: mod_base = gm
  modified_base 8: mod_base = gm
  modified_base 9: mod_base = OTHER; note = 2'-fluoroadenosine
  modified_base 10: mod_base = OTHER; note = 2'-O-methyladenosine
  modified_base 11: mod_base = OTHER; note = 2'-fluoroadenosine
  modified_base 12: mod_base = cm
  modified_base 13: mod_base = OTHER; note = 2'-fluorouridine
  modified_base 14: mod_base = gm
  modified_base 15: mod_base = OTHER; note = 2'-O-methyladenosine
  modified_base 16: mod_base = OTHER; note = 2'-O-methyladenosine
  modified_base 17: mod_base = cm
  modified_base 18: mod_base = OTHER; note = 2'-O-methyladenosine
  modified_base 19: mod_base = cm
  modified_base 20: mod_base = OTHER; note = 2'-O-methyladenosine
  modified_base 21: mod_base = OTHER; note = 2'-O-methyladenosine
  source 1..21: mol_type = other RNA
cggaatggaaactgaacacaa

SEQ ID NO: 675 - RNA, 21 nt, synthetic construct
  modified_base 1: mod_base = cm
  modified_base 1^2: mod_base = OTHER; note = phosphorothioate linkage
  modified_base 2: mod_base = cm
  modified_base 3: mod_base = um
  modified_base 4: mod_base = gm
  modified_base 5: mod_base = gm
  modified_base 6: mod_base = gm
  modified_base 7: mod_base = OTHER; note = 2'-O-methyladenosine
  modified_base 8: mod_base = OTHER; note = 2'-O-methyladenosine
  modified_base 9: mod_base = OTHER; note = 2'-fluoroguanosine
  modified_base 10: mod_base = OTHER; note = 2'-fluorocytidine
  modified_base 11: mod_base = OTHER; note = 2'-fluorocytidine
  modified_base 12: mod_base = OTHER; note = 2'-O-methyladenosine
  modified_base 13: mod_base = gm
  modified_base 14: mod_base = OTHER; note = 2'-O-methyladenosine
  modified_base 15: mod_base = OTHER; note = 2'-O-methyladenosine
  modified_base 16: mod_base = OTHER; note = 2'-O-methyladenosine
  modified_base 17: mod_base = um
  modified_base 18: mod_base = um
  modified_base 19: mod_base = gm
  modified_base 20: mod_base = um
  modified_base 21: mod_base = OTHER; note = 2'-O-methyladenosine
  source 1..21: mol_type = other RNA
cctgggaagccagaaattgta

SEQ ID NO: 676 - RNA, 21 nt, synthetic construct
  modified_base 1: mod_base = cm
  modified_base 1^2: mod_base = OTHER; note = phosphorothioate linkage
  modified_base 2: mod_base = gm
  modified_base 3: mod_base = gm
  modified_base 4: mod_base = OTHER; note = 2'-O-methyladenosine
  modified_base 5: mod_base = OTHER; note = 2'-O-methyladenosine
  modified_base 6: mod_base = um
  modified_base 7: mod_base = gm
  modified_base 8: mod_base = gm
  modified_base 9: mod_base = OTHER; note = 2'-fluoroadenosine
  modified_base 10: mod_base = OTHER; note = 2'-fluoroadenosine
  modified_base 11: mod_base = OTHER; note = 2'-fluoroadenosine
  modified_base 12: mod_base = cm
  modified_base 13: mod_base = um
  modified_base 14: mod_base = gm
  modified_base 15: mod_base = OTHER; note = 2'-O-methyladenosine
  modified_base 16: mod_base = OTHER; note = 2'-O-methyladenosine
  modified_base 17: mod_base = cm
  modified_base 18: mod_base = OTHER; note = 2'-O-methyladenosine
  modified_base 19: mod_base = cm
  modified_base 20: mod_base = OTHER; note = 2'-O-methyladenosine
  modified_base 21: mod_base = OTHER; note = 2'-O-methyladenosine
  source 1..21: mol_type = other RNA
cggaatggaaactgaacacaa

SEQ ID NO: 677 - RNA, 21 nt, synthetic construct
  modified_base 1: mod_base = cm
  modified_base 1^2: mod_base = OTHER; note = phosphorothioate linkage
  modified_base 2: mod_base = gm
  modified_base 3: mod_base = gm
  modified_base 4: mod_base = OTHER; note = 2'-O-methyladenosine
  modified_base 5: mod_base = OTHER; note = 2'-O-methyladenosine
  modified_base 6: mod_base = um
  modified_base 7: mod_base = gm
  modified_base 8: mod_base = gm
  modified_base 9: mod_base = OTHER; note = 2'-fluoroadenosine
  modified_base 10: mod_base = OTHER; note = 2'-fluoroadenosine
  modified_base 11: mod_base = OTHER; note = 2'-fluoroadenosine
  modified_base 12: mod_base = cm
  modified_base 13: mod_base = um
  modified_base 14: mod_base = gm
  modified_base 15: mod_base = OTHER; note = 2'-O-methyladenosine
  modified_base 16: mod_base = OTHER; note = 2'-O-methyladenosine
  modified_base 17: mod_base = cm
  modified_base 18: mod_base = OTHER; note = 2'-O-methyladenosine
  modified_base 19: mod_base = cm
  modified_base 20: mod_base = OTHER; note = 2'-O-methyladenosine
  modified_base 21: mod_base = OTHER; note = 2'-O-methyladenosine
  source 1..21: mol_type = other RNA
cggaatggaaactgaacacaa

SEQ ID NO: 678 - RNA, 21 nt, synthetic construct
  modified_base 1: mod_base = gm
  modified_base 1^2: mod_base = OTHER; note = phosphorothioate linkage
  modified_base 2: mod_base = gm
  modified_base 3: mod_base = OTHER; note = 2'-O-methyladenosine
  modified_base 4: mod_base = OTHER; note = 2'-O-methyladenosine
  modified_base 5: mod_base = um
  modified_base 6: mod_base = gm
  modified_base 7: mod_base = gm
  modified_base 8: mod_base = OTHER; note = 2'-O-methyladenosine
  modified_base 9: mod_base = OTHER; note = 2'-fluoroadenosine
  modified_base 10: mod_base = OTHER; note = 2'-fluoroadenosine
  modified_base 11: mod_base = OTHER; note = 2'-fluorocytidine
  modified_base 12: mod_base = um
  modified_base 13: mod_base = gm
  modified_base 14: mod_base = OTHER; note = 2'-O-methyladenosine
  modified_base 15: mod_base = OTHER; note = 2'-O-methyladenosine
  modified_base 16: mod_base = cm
  modified_base 17: mod_base = OTHER; note = 2'-O-methyladenosine
  modified_base 18: mod_base = cm
  modified_base 19: mod_base = OTHER; note = 2'-O-methyladenosine
  modified_base 20: mod_base = OTHER; note = 2 -O-methylinosine
  modified_base 21: mod_base = OTHER; note = 2'-O-methyladenosine
  source 1..21: mol_type = other RNA
ggaatggaaactgaacacana

SEQ ID NO: 679 - RNA, 21 nt, synthetic construct
  modified_base 1: mod_base = OTHER; note = 2'-O-methyladenosine
  modified_base 1^2: mod_base = OTHER; note = phosphorothioate linkage
  modified_base 2: mod_base = cm
  modified_base 3: mod_base = cm
  modified_base 4: mod_base = OTHER; note = 2'-O-methyladenosine
  modified_base 5: mod_base = gm
  modified_base 6: mod_base = OTHER; note = 2'-O-methyladenosine
  modified_base 7: mod_base = um
  modified_base 8: mod_base = um
  modified_base 9: mod_base = OTHER; note = 2'-fluorocytidine
  modified_base 10: mod_base = OTHER; note = 2'-fluorocytidine
  modified_base 11: mod_base = OTHER; note = 2'-fluorouridine
  modified_base 12: mod_base = gm
  modified_base 13: mod_base = gm
  modified_base 14: mod_base = gm
  modified_base 15: mod_base = OTHER; note = 2'-O-methyladenosine
  modified_base 16: mod_base = OTHER; note = 2'-O-methyladenosine
  modified_base 17: mod_base = OTHER; note = 2 -O-methylinosine
  modified_base 18: mod_base = cm
  modified_base 19: mod_base = cm
  modified_base 20: mod_base = OTHER; note = 2'-O-methyladenosine
  modified_base 21: mod_base = OTHER; note = 2'-O-methyladenosine
  source 1..21: mol_type = other RNA
accagattcctgggaanccaa

SEQ ID NO: 680 - RNA, 21 nt, synthetic construct
  modified_base 1: mod_base = um
  modified_base 1^2: mod_base = OTHER; note = phosphorothioate linkage
  modified_base 2: mod_base = cm
  modified_base 3: mod_base = cm
  modified_base 4: mod_base = um
  modified_base 5: mod_base = gm
  modified_base 6: mod_base = gm
  modified_base 7: mod_base = gm
  modified_base 8: mod_base = OTHER; note = 2'-O-methyladenosine
  modified_base 9: mod_base = OTHER; note = 2'-fluoroadenosine
  modified_base 10: mod_base = OTHER; note = 2'-fluoroguanosine
  modified_base 11: mod_base = OTHER; note = 2'-fluorocytidine
  modified_base 12: mod_base = cm
  modified_base 13: mod_base = OTHER; note = 2'-O-methyladenosine
  modified_base 14: mod_base = gm
  modified_base 15: mod_base = OTHER; note = 2'-O-methyladenosine
  modified_base 16: mod_base = OTHER; note = 2'-O-methyladenosine
  modified_base 17: mod_base = OTHER; note = 2'-O-methyladenosine
  modified_base 18: mod_base = um
  modified_base 19: mod_base = um
  modified_base 20: mod_base = gm
  modified_base 21: mod_base = um
  source 1..21: mol_type = other RNA
tcctgggaagccagaaattgt

SEQ ID NO: 681 - RNA, 21 nt, synthetic construct
  modified_base 1: mod_base = gm
  modified_base 1^2: mod_base = OTHER; note = phosphorothioate linkage
  modified_base 2: mod_base = cm
  modified_base 3: mod_base = cm
  modified_base 4: mod_base = OTHER; note = 2'-O-methyladenosine
  modified_base 5: mod_base = cm
  modified_base 6: mod_base = um
  modified_base 7: mod_base = gm
  modified_base 8: mod_base = gm
  modified_base 9: mod_base = OTHER; note = 2'-fluorouridine
  modified_base 10: mod_base = OTHER; note = 2'-fluoroguanosine
  modified_base 11: mod_base = OTHER; note = 2'-fluorocytidine
  modified_base 12: mod_base = um
  modified_base 13: mod_base = gm
  modified_base 14: mod_base = OTHER; note = 2'-O-methyladenosine
  modified_base 15: mod_base = OTHER; note = 2'-O-methyladenosine
  modified_base 16: mod_base = gm
  modified_base 17: mod_base = um
  modified_base 18: mod_base = gm
  modified_base 19: mod_base = um
  modified_base 20: mod_base = OTHER; note = 2'-O-methyladenosine
  modified_base 21: mod_base = OTHER; note = 2'-O-methyladenosine
  source 1..21: mol_type = other RNA
gccactggtgctgaagtgtaa

SEQ ID NO: 682 - RNA, 21 nt, synthetic construct
  modified_base 1: mod_base = cm
  modified_base 1^2: mod_base = OTHER; note = phosphorothioate linkage
  modified_base 2: mod_base = gm
  modified_base 3: mod_base = gm
  modified_base 4: mod_base = OTHER; note = 2'-O-methyladenosine
  modified_base 5: mod_base = cm
  modified_base 6: mod_base = OTHER; note = 2'-O-methyladenosine
  modified_base 7: mod_base = gm
  modified_base 8: mod_base = OTHER; note = 2'-O-methyladenosine
  modified_base 9: mod_base = OTHER; note = 2'-fluoroadenosine
  modified_base 10: mod_base = OTHER; note = 2'-fluoroguanosine
  modified_base 11: mod_base = OTHER; note = 2'-fluorocytidine
  modified_base 12: mod_base = um
  modified_base 13: mod_base = um
  modified_base 14: mod_base = gm
  modified_base 15: mod_base = gm
  modified_base 16: mod_base = OTHER; note = 2'-O-methyladenosine
  modified_base 17: mod_base = OTHER; note = 2'-O-methyladenosine
  modified_base 18: mod_base = gm
  modified_base 19: mod_base = OTHER; note = 2 -O-methylinosine
  modified_base 20: mod_base = um
  modified_base 21: mod_base = OTHER; note = 2'-O-methyladenosine
  source 1..21: mol_type = other RNA
cggacagaagcttggaagnta

SEQ ID NO: 683 - RNA, 21 nt, synthetic construct
  modified_base 1: mod_base = cm
  modified_base 1^2: mod_base = OTHER; note = phosphorothioate linkage
  modified_base 2: mod_base = OTHER; note = 2'-O-methyladenosine
  modified_base 3: mod_base = gm
  modified_base 4: mod_base = gm
  modified_base 5: mod_base = OTHER; note = 2'-O-methyladenosine
  modified_base 6: mod_base = um
  modified_base 7: mod_base = gm
  modified_base 8: mod_base = OTHER; note = 2'-O-methyladenosine
  modified_base 9: mod_base = OTHER; note = 2'-fluoroguanosine
  modified_base 10: mod_base = OTHER; note = 2'-fluoroguanosine
  modified_base 11: mod_base = OTHER; note = 2'-fluoroguanosine
  modified_base 12: mod_base = gm
  modified_base 13: mod_base = OTHER; note = 2'-O-methyladenosine
  modified_base 14: mod_base = um
  modified_base 15: mod_base = um
  modified_base 16: mod_base = um
  modified_base 17: mod_base = um
  modified_base 18: mod_base = cm
  modified_base 19: mod_base = cm
  modified_base 20: mod_base = OTHER; note = 2 -O-methylinosine
  modified_base 21: mod_base = OTHER; note = 2'-O-methyladenosine
  source 1..21: mol_type = other RNA
caggatgaggggattttccna

SEQ ID NO: 684 - RNA, 21 nt, synthetic construct
  modified_base 1: mod_base = OTHER; note = 2'-O-methyladenosine
  modified_base 1^2: mod_base = OTHER; note = phosphorothioate linkage
  modified_base 2: mod_base = gm
  modified_base 3: mod_base = OTHER; note = 2'-O-methyladenosine
  modified_base 4: mod_base = um
  modified_base 5: mod_base = um
  modified_base 6: mod_base = cm
  modified_base 7: mod_base = cm
  modified_base 8: mod_base = um
  modified_base 9: mod_base = OTHER; note = 2'-fluoroguanosine
  modified_base 10: mod_base = OTHER; note = 2'-fluoroguanosine
  modified_base 11: mod_base = OTHER; note = 2'-fluoroguanosine
  modified_base 12: mod_base = OTHER; note = 2'-O-methyladenosine
  modified_base 13: mod_base = OTHER; note = 2'-O-methyladenosine
  modified_base 14: mod_base = gm
  modified_base 15: mod_base = cm
  modified_base 16: mod_base = um
  modified_base 17: mod_base = OTHER; note = 2'-O-methyladenosine
  modified_base 18: mod_base = gm
  modified_base 19: mod_base = OTHER; note = 2'-O-methyladenosine
  modified_base 20: mod_base = OTHER; note = 2'-O-methyladenosine
  modified_base 21: mod_base = OTHER; note = 2'-O-methyladenosine
  source 1..21: mol_type = other RNA
agattcctgggaagctagaaa

SEQ ID NO: 685 - RNA, 21 nt, synthetic construct
  modified_base 1: mod_base = OTHER; note = 2-aminoadenine
  modified_base 1^2: mod_base = OTHER; note = phosphorothioate linkage
  modified_base 2: mod_base = gm
  modified_base 3: mod_base = OTHER; note = 2'-O-methyladenosine
  modified_base 4: mod_base = um
  modified_base 5: mod_base = um
  modified_base 6: mod_base = cm
  modified_base 7: mod_base = um
  modified_base 8: mod_base = gm
  modified_base 9: mod_base = OTHER; note = 2'-fluorocytidine
  modified_base 10: mod_base = OTHER; note = 2'-fluorocytidine
  modified_base 11: mod_base = OTHER; note = 2'-fluorouridine
  modified_base 12: mod_base = cm
  modified_base 13: mod_base = um
  modified_base 14: mod_base = gm
  modified_base 15: mod_base = OTHER; note = 2'-O-methyladenosine
  modified_base 16: mod_base = OTHER; note = 2'-O-methyladenosine
  modified_base 17: mod_base = cm
  modified_base 18: mod_base = um
  modified_base 19: mod_base = cm
  modified_base 20: mod_base = OTHER; note = 2'-O-methyladenosine
  modified_base 21: mod_base = OTHER; note = 2'-O-methyladenosine
  source 1..21: mol_type = other RNA
agattctgcctctgaactcaa

SEQ ID NO: 686 - RNA, 21 nt, synthetic construct
  modified_base 1: mod_base = um
  modified_base 1^2: mod_base = OTHER; note = phosphorothioate linkage
  modified_base 2: mod_base = OTHER; note = 2'-O-methyladenosine
  modified_base 3: mod_base = cm
  modified_base 4: mod_base = cm
  modified_base 5: mod_base = cm
  modified_base 6: mod_base = um
  modified_base 7: mod_base = gm
  modified_base 8: mod_base = cm
  modified_base 9: mod_base = OTHER; note = 2'-fluoroadenosine
  modified_base 10: mod_base = OTHER; note = 2'-fluoroguanosine
  modified_base 11: mod_base = OTHER; note = 2'-fluoroguanosine
  modified_base 12: mod_base = gm
  modified_base 13: mod_base = OTHER; note = 2'-O-methyladenosine
  modified_base 14: mod_base = cm
  modified_base 15: mod_base = um
  modified_base 16: mod_base = cm
  modified_base 17: mod_base = um
  modified_base 18: mod_base = um
  modified_base 19: mod_base = OTHER; note = 2'-O-methyladenosine
  modified_base 20: mod_base = gm
  modified_base 21: mod_base = OTHER; note = 2'-O-methyladenosine
  source 1..21: mol_type = other RNA
taccctgcagggactcttaga

SEQ ID NO: 687 - RNA, 21 nt, synthetic construct
  modified_base 1: mod_base = OTHER; note = 2'-O-methyladenosine
  modified_base 1^2: mod_base = OTHER; note = phosphorothioate linkage
  modified_base 2: mod_base = cm
  modified_base 3: mod_base = cm
  modified_base 4: mod_base = cm
  modified_base 5: mod_base = um
  modified_base 6: mod_base = gm
  modified_base 7: mod_base = cm
  modified_base 8: mod_base = OTHER; note = 2'-O-methyladenosine
  modified_base 9: mod_base = OTHER; note = 2'-fluoroguanosine
  modified_base 10: mod_base = OTHER; note = 2'-fluoroguanosine
  modified_base 11: mod_base = OTHER; note = 2'-fluoroguanosine
  modified_base 12: mod_base = OTHER; note = 2'-O-methyladenosine
  modified_base 13: mod_base = cm
  modified_base 14: mod_base = um
  modified_base 15: mod_base = cm
  modified_base 16: mod_base = um
  modified_base 17: mod_base = um
  modified_base 18: mod_base = OTHER; note = 2'-O-methyladenosine
  modified_base 19: mod_base = OTHER; note = 2 -O-methylinosine
  modified_base 20: mod_base = cm
  modified_base 21: mod_base = um
  source 1..21: mol_type = other RNA
accctgcagggactcttanct

SEQ ID NO: 688 - RNA, 21 nt, synthetic construct
  modified_base 1: mod_base = um
  modified_base 1^2: mod_base = OTHER; note = phosphorothioate linkage
  modified_base 2: mod_base = cm
  modified_base 3: mod_base = cm
  modified_base 4: mod_base = cm
  modified_base 5: mod_base = OTHER; note = 2'-O-methyladenosine
  modified_base 6: mod_base = cm
  modified_base 7: mod_base = cm
  modified_base 8: mod_base = um
  modified_base 9: mod_base = OTHER; note = 2'-fluorouridine
  modified_base 10: mod_base = OTHER; note = 2'-fluorocytidine
  modified_base 11: mod_base = OTHER; note = 2'-fluorouridine
  modified_base 12: mod_base = cm
  modified_base 13: mod_base = cm
  modified_base 14: mod_base = um
  modified_base 15: mod_base = gm
  modified_base 16: mod_base = um
  modified_base 17: mod_base = OTHER; note = 2'-O-methyladenosine
  modified_base 18: mod_base = OTHER; note = 2 -O-methylinosine
  modified_base 19: mod_base = cm
  modified_base 20: mod_base = um
  modified_base 21: mod_base = um
  source 1..21: mol_type = other RNA
tcccaccttctcctgtanctt

SEQ ID NO: 689 - RNA, 21 nt, synthetic construct
  modified_base 1: mod_base = OTHER; note = 2'-O-methyladenosine
  modified_base 1^2: mod_base = OTHER; note = phosphorothioate linkage
  modified_base 2: mod_base = cm
  modified_base 3: mod_base = cm
  modified_base 4: mod_base = um
  modified_base 5: mod_base = um
  modified_base 6: mod_base = cm
  modified_base 7: mod_base = um
  modified_base 8: mod_base = cm
  modified_base 9: mod_base = OTHER; note = 2'-fluorocytidine
  modified_base 10: mod_base = OTHER; note = 2'-fluorouridine
  modified_base 11: mod_base = OTHER; note = 2'-fluoroguanosine
  modified_base 12: mod_base = um
  modified_base 13: mod_base = OTHER; note = 2'-O-methyladenosine
  modified_base 14: mod_base = gm
  modified_base 15: mod_base = cm
  modified_base 16: mod_base = um
  modified_base 17: mod_base = um
  modified_base 18: mod_base = cm
  modified_base 19: mod_base = OTHER; note = 2'-O-methyladenosine
  modified_base 20: mod_base = OTHER; note = 2 -O-methylinosine
  modified_base 21: mod_base = OTHER; note = 2'-O-methyladenosine
  source 1..21: mol_type = other RNA
accttctcctgtagcttcana

SEQ ID NO: 690 - RNA, 21 nt, synthetic construct
  modified_base 1: mod_base = gm
  modified_base 1^2: mod_base = OTHER; note = phosphorothioate linkage
  modified_base 2: mod_base = gm
  modified_base 3: mod_base = um
  modified_base 4: mod_base = gm
  modified_base 5: mod_base = cm
  modified_base 6: mod_base = um
  modified_base 7: mod_base = gm
  modified_base 8: mod_base = gm
  modified_base 9: mod_base = OTHER; note = 2'-fluorouridine
  modified_base 10: mod_base = OTHER; note = 2'-fluorocytidine
  modified_base 11: mod_base = OTHER; note = 2'-fluorocytidine
  modified_base 12: mod_base = um
  modified_base 13: mod_base = cm
  modified_base 14: mod_base = OTHER; note = 2'-O-methyladenosine
  modified_base 15: mod_base = gm
  modified_base 16: mod_base = um
  modified_base 17: mod_base = cm
  modified_base 18: mod_base = um
  modified_base 19: mod_base = OTHER; note = 2 -O-methylinosine
  modified_base 20: mod_base = um
  modified_base 21: mod_base = OTHER; note = 2'-O-methyladenosine
  source 1..21: mol_type = other RNA
ggtgctggtcctcagtctnta

SEQ ID NO: 691 - RNA, 21 nt, synthetic construct
  modified_base 1: mod_base = gm
  modified_base 1^2: mod_base = OTHER; note = phosphorothioate linkage
  modified_base 2: mod_base = gm
  modified_base 3: mod_base = um
  modified_base 4: mod_base = gm
  modified_base 5: mod_base = cm
  modified_base 6: mod_base = um
  modified_base 7: mod_base = gm
  modified_base 8: mod_base = gm
  modified_base 9: mod_base = OTHER; note = 2'-fluorouridine
  modified_base 10: mod_base = OTHER; note = 2'-fluorocytidine
  modified_base 11: mod_base = OTHER; note = 2'-fluorocytidine
  modified_base 12: mod_base = um
  modified_base 13: mod_base = cm
  modified_base 14: mod_base = OTHER; note = 2'-O-methyladenosine
  modified_base 15: mod_base = gm
  modified_base 16: mod_base = um
  modified_base 17: mod_base = cm
  modified_base 18: mod_base = um
  modified_base 19: mod_base = gm
  modified_base 20: mod_base = um
  modified_base 21: mod_base = OTHER; note = 2'-O-methyladenosine
  source 1..21: mol_type = other RNA
ggtgctggtcctcagtctgta

SEQ ID NO: 692 - RNA, 21 nt, synthetic construct
  modified_base 1: mod_base = gm
  modified_base 1^2: mod_base = OTHER; note = phosphorothioate linkage
  modified_base 2: mod_base = um
  modified_base 3: mod_base = gm
  modified_base 4: mod_base = cm
  modified_base 5: mod_base = um
  modified_base 6: mod_base = gm
  modified_base 7: mod_base = gm
  modified_base 8: mod_base = um
  modified_base 9: mod_base = OTHER; note = 2'-fluorocytidine
  modified_base 10: mod_base = OTHER; note = 2'-fluorocytidine
  modified_base 11: mod_base = OTHER; note = 2'-fluorouridine
  modified_base 12: mod_base = cm
  modified_base 13: mod_base = OTHER; note = 2'-O-methyladenosine
  modified_base 14: mod_base = gm
  modified_base 15: mod_base = um
  modified_base 16: mod_base = cm
  modified_base 17: mod_base = um
  modified_base 18: mod_base = gm
  modified_base 19: mod_base = um
  modified_base 20: mod_base = OTHER; note = 2 -O-methylinosine
  modified_base 21: mod_base = OTHER; note = 2'-O-methyladenosine
  source 1..21: mol_type = other RNA
gtgctggtcctcagtctgtna

SEQ ID NO: 693 - RNA, 21 nt, synthetic construct
  modified_base 1: mod_base = gm
  modified_base 1^2: mod_base = OTHER; note = phosphorothioate linkage
  modified_base 2: mod_base = um
  modified_base 3: mod_base = gm
  modified_base 4: mod_base = cm
  modified_base 5: mod_base = um
  modified_base 6: mod_base = gm
  modified_base 7: mod_base = gm
  modified_base 8: mod_base = um
  modified_base 9: mod_base = OTHER; note = 2'-fluorocytidine
  modified_base 10: mod_base = OTHER; note = 2'-fluorocytidine
  modified_base 11: mod_base = OTHER; note = 2'-fluorouridine
  modified_base 12: mod_base = cm
  modified_base 13: mod_base = OTHER; note = 2'-O-methyladenosine
  modified_base 14: mod_base = gm
  modified_base 15: mod_base = um
  modified_base 16: mod_base = cm
  modified_base 17: mod_base = um
  modified_base 18: mod_base = OTHER; note = 2 -O-methylinosine
  modified_base 19: mod_base = um
  modified_base 20: mod_base = gm
  modified_base 21: mod_base = OTHER; note = 2'-O-methyladenosine
  source 1..21: mol_type = other RNA
gtgctggtcctcagtctntga

SEQ ID NO: 694 - RNA, 21 nt, synthetic construct
  modified_base 1: mod_base = cm
  modified_base 1^2: mod_base = OTHER; note = phosphorothioate linkage
  modified_base 2: mod_base = gm
  modified_base 3: mod_base = gm
  modified_base 4: mod_base = OTHER; note = 2'-O-methyladenosine
  modified_base 5: mod_base = OTHER; note = 2'-O-methyladenosine
  modified_base 6: mod_base = um
  modified_base 7: mod_base = gm
  modified_base 8: mod_base = gm
  modified_base 9: mod_base = OTHER; note = 2'-fluoroadenosine
  modified_base 10: mod_base = OTHER; note = 2'-fluoroadenosine
  modified_base 11: mod_base = OTHER; note = 2'-fluoroadenosine
  modified_base 12: mod_base = cm
  modified_base 13: mod_base = um
  modified_base 14: mod_base = gm
  modified_base 15: mod_base = OTHER; note = 2'-O-methyladenosine
  modified_base 16: mod_base = OTHER; note = 2'-O-methyladenosine
  modified_base 17: mod_base = cm
  modified_base 18: mod_base = OTHER; note = 2'-O-methyladenosine
  modified_base 19: mod_base = cm
  modified_base 20: mod_base = OTHER; note = 2'-O-methyladenosine
  modified_base 21: mod_base = OTHER; note = 2'-O-methyladenosine
  source 1..21: mol_type = other RNA
cggaatggaaactgaacacaa

SEQ ID NO: 695 - RNA, 21 nt, synthetic construct
  modified_base 1: mod_base = gm
  modified_base 1^2: mod_base = OTHER; note = phosphorothioate linkage
  modified_base 2: mod_base = gm
  modified_base 3: mod_base = gm
  modified_base 4: mod_base = OTHER; note = 2'-O-methyladenosine
  modified_base 5: mod_base = OTHER; note = 2'-O-methyladenosine
  modified_base 6: mod_base = um
  modified_base 7: mod_base = gm
  modified_base 8: mod_base = gm
  modified_base 9: mod_base = OTHER; note = 2'-fluoroadenosine
  modified_base 10: mod_base = OTHER; note = 2'-fluoroadenosine
  modified_base 11: mod_base = OTHER; note = 2'-fluoroadenosine
  modified_base 12: mod_base = cm
  modified_base 13: mod_base = um
  modified_base 14: mod_base = gm
  modified_base 15: mod_base = OTHER; note = 2'-O-methyladenosine
  modified_base 16: mod_base = OTHER; note = 2'-O-methyladenosine
  modified_base 17: mod_base = cm
  modified_base 18: mod_base = OTHER; note = 2'-O-methyladenosine
  modified_base 19: mod_base = cm
  modified_base 20: mod_base = OTHER; note = 2'-O-methyladenosine
  modified_base 21: mod_base = OTHER; note = 2'-O-methyladenosine
  source 1..21: mol_type = other RNA
gggaatggaaactgaacacaa

SEQ ID NO: 696 - RNA, 21 nt, synthetic construct
  modified_base 1: mod_base = cm
  modified_base 1^2: mod_base = OTHER; note = phosphorothioate linkage
  modified_base 2: mod_base = gm
  modified_base 3: mod_base = gm
  modified_base 4: mod_base = OTHER; note = 2'-O-methyladenosine
  modified_base 5: mod_base = OTHER; note = 2'-O-methyladenosine
  modified_base 6: mod_base = um
  modified_base 7: mod_base = gm
  modified_base 8: mod_base = gm
  modified_base 9: mod_base = OTHER; note = 2'-fluoroadenosine
  modified_base 10: mod_base = OTHER; note = 2'-fluoroadenosine
  modified_base 11: mod_base = OTHER; note = 2'-fluoroadenosine
  modified_base 12: mod_base = cm
  modified_base 13: mod_base = um
  modified_base 14: mod_base = OTHER; note = 2 -O-methylinosine
  modified_base 15: mod_base = OTHER; note = 2'-O-methyladenosine
  modified_base 16: mod_base = OTHER; note = 2'-O-methyladenosine
  modified_base 17: mod_base = cm
  modified_base 18: mod_base = OTHER; note = 2'-O-methyladenosine
  modified_base 19: mod_base = cm
  modified_base 20: mod_base = OTHER; note = 2'-O-methyladenosine
  modified_base 21: mod_base = OTHER; note = 2'-O-methyladenosine
  source 1..21: mol_type = other RNA
cggaatggaaactnaacacaa

SEQ ID NO: 697 - RNA, 21 nt, synthetic construct
  modified_base 1: mod_base = cm
  modified_base 1^2: mod_base = OTHER; note = phosphorothioate linkage
  modified_base 2: mod_base = gm
  modified_base 3: mod_base = gm
  modified_base 4: mod_base = OTHER; note = 2'-O-methyladenosine
  modified_base 5: mod_base = OTHER; note = 2'-O-methyladenosine
  modified_base 6: mod_base = um
  modified_base 7: mod_base = gm
  modified_base 8: mod_base = gm
  modified_base 9: mod_base = OTHER; note = 2'-fluoroadenosine
  modified_base 10: mod_base = OTHER; note = 2-aminoadenine
  modified_base 11: mod_base = OTHER; note = 2'-fluoroadenosine
  modified_base 12: mod_base = cm
  modified_base 13: mod_base = um
  modified_base 14: mod_base = OTHER; note = 2 -O-methylinosine
  modified_base 15: mod_base = OTHER; note = 2'-O-methyladenosine
  modified_base 16: mod_base = OTHER; note = 2'-O-methyladenosine
  modified_base 17: mod_base = cm
  modified_base 18: mod_base = OTHER; note = 2'-O-methyladenosine
  modified_base 19: mod_base = cm
  modified_base 20: mod_base = OTHER; note = 2'-O-methyladenosine
  modified_base 21: mod_base = OTHER; note = 2'-O-methyladenosine
  source 1..21: mol_type = other RNA
cggaatggaaactnaacacaa

SEQ ID NO: 698 - RNA, 21 nt, synthetic construct
  modified_base 1: mod_base = cm
  modified_base 1^2: mod_base = OTHER; note = phosphorothioate linkage
  modified_base 2: mod_base = gm
  modified_base 3: mod_base = gm
  modified_base 4: mod_base = OTHER; note = 2'-O-methyladenosine
  modified_base 5: mod_base = OTHER; note = 2'-O-methyladenosine
  modified_base 6: mod_base = um
  modified_base 7: mod_base = gm
  modified_base 8: mod_base = gm
  modified_base 9: mod_base = OTHER; note = 2'-fluoroadenosine
  modified_base 10: mod_base = OTHER; note = 2'-fluoroadenosine
  modified_base 11: mod_base = OTHER; note = 2'-fluoroadenosine
  modified_base 12: mod_base = cm
  modified_base 13: mod_base = um
  modified_base 14: mod_base = gm
  modified_base 15: mod_base = OTHER; note = 2'-O-methyladenosine
  modified_base 16: mod_base = OTHER; note = 2'-O-methyladenosine
  modified_base 17: mod_base = um
  modified_base 18: mod_base = OTHER; note = 2'-O-methyladenosine
  modified_base 19: mod_base = cm
  modified_base 20: mod_base = OTHER; note = 2'-O-methyladenosine
  modified_base 21: mod_base = OTHER; note = 2'-O-methyladenosine
  source 1..21: mol_type = other RNA
cggaatggaaactgaatacaa

SEQ ID NO: 699 - RNA, 21 nt, synthetic construct
  modified_base 1: mod_base = cm
  modified_base 1^2: mod_base = OTHER; note = phosphorothioate linkage
  modified_base 2: mod_base = gm
  modified_base 3: mod_base = gm
  modified_base 4: mod_base = OTHER; note = 2'-O-methyladenosine
  modified_base 5: mod_base = OTHER; note = 2'-O-methyladenosine
  modified_base 6: mod_base = um
  modified_base 7: mod_base = OTHER; note = 2'-fluoroguanosine
  modified_base 8: mod_base = gm
  modified_base 9: mod_base = OTHER; note = 2'-fluoroadenosine
  modified_base 10: mod_base = OTHER; note = 2'-O-methyladenosine
  modified_base 11: mod_base = OTHER; note = 2'-fluoroadenosine
  modified_base 12: mod_base = cm
  modified_base 13: mod_base = um
  modified_base 14: mod_base = gm
  modified_base 15: mod_base = OTHER; note = 2'-O-methyladenosine
  modified_base 16: mod_base = OTHER; note = 2'-O-methyladenosine
  modified_base 17: mod_base = cm
  modified_base 18: mod_base = OTHER; note = 2'-O-methyladenosine
  modified_base 19: mod_base = cm
  modified_base 20: mod_base = OTHER; note = 2'-O-methyladenosine
  modified_base 21: mod_base = OTHER; note = 2'-O-methyladenosine
  source 1..21: mol_type = other RNA
cggaatggaaactgaacacaa

SEQ ID NO: 700 - RNA, 21 nt, synthetic construct
  modified_base 1: mod_base = um
  modified_base 1^2: mod_base = OTHER; note = phosphorothioate linkage
  modified_base 2: mod_base = cm
  modified_base 3: mod_base = cm
  modified_base 4: mod_base = um
  modified_base 5: mod_base = gm
  modified_base 6: mod_base = gm
  modified_base 7: mod_base = gm
  modified_base 8: mod_base = OTHER; note = 2'-O-methyladenosine
  modified_base 9: mod_base = OTHER; note = 2'-fluoroadenosine
  modified_base 10: mod_base = OTHER; note = 2'-fluoroguanosine
  modified_base 11: mod_base = OTHER; note = 2'-fluorocytidine
  modified_base 12: mod_base = cm
  modified_base 13: mod_base = OTHER; note = 2'-O-methyladenosine
  modified_base 14: mod_base = gm
  modified_base 15: mod_base = OTHER; note = 2'-O-methyladenosine
  modified_base 16: mod_base = OTHER; note = 2'-O-methyladenosine
  modified_base 17: mod_base = OTHER; note = 2'-O-methyladenosine
  modified_base 18: mod_base = um
  modified_base 19: mod_base = um
  modified_base 20: mod_base = gm
  modified_base 21: mod_base = um
  source 1..21: mol_type = other RNA
tcctgggaagccagaaattgt

SEQ ID NO: 701 - RNA, 21 nt, synthetic construct
  modified_base 1: mod_base = gm
  modified_base 1^2: mod_base = OTHER; note = phosphorothioate linkage
  modified_base 2: mod_base = OTHER; note = 2'-O-methyladenosine
  modified_base 3: mod_base = gm
  modified_base 4: mod_base = um
  modified_base 5: mod_base = OTHER; note = 2'-O-methyladenosine
  modified_base 6: mod_base = gm
  modified_base 7: mod_base = gm
  modified_base 8: mod_base = um
  modified_base 9: mod_base = OTHER; note = 2'-fluoroguanosine
  modified_base 10: mod_base = OTHER; note = 2'-fluorocytidine
  modified_base 11: mod_base = OTHER; note = 2'-fluorouridine
  modified_base 12: mod_base = cm
  modified_base 13: mod_base = OTHER; note = 2'-O-methyladenosine
  modified_base 14: mod_base = OTHER; note = 2'-O-methyladenosine
  modified_base 15: mod_base = OTHER; note = 2'-O-methyladenosine
  modified_base 16: mod_base = OTHER; note = 2'-O-methyladenosine
  modified_base 17: mod_base = cm
  modified_base 18: mod_base = OTHER; note = 2'-O-methyladenosine
  modified_base 19: mod_base = um
  modified_base 20: mod_base = cm
  modified_base 21: mod_base = OTHER; note = 2'-O-methyladenosine
  source 1..21: mol_type = other RNA
gagtaggtgctcaaaacatca

SEQ ID NO: 702 - RNA, 21 nt, synthetic construct
  modified_base 1: mod_base = OTHER; note = 2'-O-methyladenosine
  modified_base 1^2: mod_base = OTHER; note = phosphorothioate linkage
  modified_base 2: mod_base = gm
  modified_base 3: mod_base = gm
  modified_base 4: mod_base = cm
  modified_base 5: mod_base = OTHER; note = 2'-O-methyladenosine
  modified_base 6: mod_base = OTHER; note = 2'-O-methyladenosine
  modified_base 7: mod_base = um
  modified_base 8: mod_base = gm
  modified_base 9: mod_base = OTHER; note = 2'-fluoroadenosine
  modified_base 10: mod_base = OTHER; note = 2'-fluoroadenosine
  modified_base 11: mod_base = OTHER; note = 2'-fluorocytidine
  modified_base 12: mod_base = OTHER; note = 2'-O-methyladenosine
  modified_base 13: mod_base = gm
  modified_base 14: mod_base = gm
  modified_base 15: mod_base = OTHER; note = 2'-O-methyladenosine
  modified_base 16: mod_base = OTHER; note = 2'-O-methyladenosine
  modified_base 17: mod_base = um
  modified_base 18: mod_base = OTHER; note = 2 -O-methylinosine
  modified_base 19: mod_base = gm
  modified_base 20: mod_base = OTHER; note = 2'-O-methyladenosine
  modified_base 21: mod_base = OTHER; note = 2'-O-methyladenosine
  source 1..21: mol_type = other RNA
aggcaatgaacaggaatngaa

SEQ ID NO: 703 - RNA, 21 nt, synthetic construct
  modified_base 1: mod_base = OTHER; note = 2'-O-methyladenosine
  modified_base 1^2: mod_base = OTHER; note = phosphorothioate linkage
  modified_base 2: mod_base = gm
  modified_base 3: mod_base = um
  modified_base 4: mod_base = cm
  modified_base 5: mod_base = cm
  modified_base 6: mod_base = gm
  modified_base 7: mod_base = um
  modified_base 8: mod_base = gm
  modified_base 9: mod_base = OTHER; note = 2'-fluorouridine
  modified_base 10: mod_base = OTHER; note = 2'-fluorocytidine
  modified_base 11: mod_base = OTHER; note = 2'-fluorouridine
  modified_base 12: mod_base = OTHER; note = 2'-O-methyladenosine
  modified_base 13: mod_base = cm
  modified_base 14: mod_base = cm
  modified_base 15: mod_base = OTHER; note = 2'-O-methyladenosine
  modified_base 16: mod_base = OTHER; note = 2 -O-methylinosine
  modified_base 17: mod_base = OTHER; note = 2'-O-methyladenosine
  modified_base 18: mod_base = um
  modified_base 19: mod_base = um
  modified_base 20: mod_base = cm
  modified_base 21: mod_base = OTHER; note = 2'-O-methyladenosine
  source 1..21: mol_type = other RNA
agtccgtgtctaccanattca

SEQ ID NO: 704 - RNA, 21 nt, synthetic construct
  modified_base 1: mod_base = um
  modified_base 1^2: mod_base = OTHER; note = phosphorothioate linkage
  modified_base 2: mod_base = cm
  modified_base 3: mod_base = cm
  modified_base 4: mod_base = gm
  modified_base 5: mod_base = um
  modified_base 6: mod_base = gm
  modified_base 7: mod_base = um
  modified_base 8: mod_base = cm
  modified_base 9: mod_base = OTHER; note = 2'-fluorouridine
  modified_base 10: mod_base = OTHER; note = 2'-fluoroadenosine
  modified_base 11: mod_base = OTHER; note = 2'-fluorocytidine
  modified_base 12: mod_base = cm
  modified_base 13: mod_base = OTHER; note = 2'-O-methyladenosine
  modified_base 14: mod_base = gm
  modified_base 15: mod_base = OTHER; note = 2'-O-methyladenosine
  modified_base 16: mod_base = um
  modified_base 17: mod_base = um
  modified_base 18: mod_base = cm
  modified_base 19: mod_base = cm
  modified_base 20: mod_base = um
  modified_base 21: mod_base = OTHER; note = 2'-O-methyladenosine
  source 1..21: mol_type = other RNA
tccgtgtctaccagattccta

SEQ ID NO: 705 - RNA, 21 nt, synthetic construct
  modified_base 1: mod_base = cm
  modified_base 1^2: mod_base = OTHER; note = phosphorothioate linkage
  modified_base 2: mod_base = cm
  modified_base 3: mod_base = cm
  modified_base 4: mod_base = OTHER; note = 2'-O-methyladenosine
  modified_base 5: mod_base = cm
  modified_base 6: mod_base = cm
  modified_base 7: mod_base = um
  modified_base 8: mod_base = um
  modified_base 9: mod_base = OTHER; note = 2'-fluorocytidine
  modified_base 10: mod_base = OTHER; note = 2'-fluorouridine
  modified_base 11: mod_base = OTHER; note = 2'-fluorocytidine
  modified_base 12: mod_base = cm
  modified_base 13: mod_base = um
  modified_base 14: mod_base = gm
  modified_base 15: mod_base = um
  modified_base 16: mod_base = OTHER; note = 2'-O-methyladenosine
  modified_base 17: mod_base = OTHER; note = 2 -O-methylinosine
  modified_base 18: mod_base = cm
  modified_base 19: mod_base = um
  modified_base 20: mod_base = um
  modified_base 21: mod_base = OTHER; note = 2'-O-methyladenosine
  source 1..21: mol_type = other RNA
cccaccttctcctgtanctta

SEQ ID NO: 706 - RNA, 21 nt, synthetic construct
  modified_base 1: mod_base = cm
  modified_base 1^2: mod_base = OTHER; note = phosphorothioate linkage
  modified_base 2: mod_base = um
  modified_base 3: mod_base = cm
  modified_base 4: mod_base = cm
  modified_base 5: mod_base = um
  modified_base 6: mod_base = cm
  modified_base 7: mod_base = OTHER; note = 2'-O-methyladenosine
  modified_base 8: mod_base = OTHER; note = 2'-O-methyladenosine
  modified_base 9: mod_base = OTHER; note = 2'-fluoroadenosine
  modified_base 10: mod_base = OTHER; note = 2'-fluorouridine
  modified_base 11: mod_base = OTHER; note = 2'-fluorocytidine
  modified_base 12: mod_base = cm
  modified_base 13: mod_base = OTHER; note = 2'-O-methyladenosine
  modified_base 14: mod_base = cm
  modified_base 15: mod_base = um
  modified_base 16: mod_base = OTHER; note = 2 -O-methylinosine
  modified_base 17: mod_base = gm
  modified_base 18: mod_base = OTHER; note = 2'-O-methyladenosine
  modified_base 19: mod_base = um
  modified_base 20: mod_base = gm
  modified_base 21: mod_base = OTHER; note = 2'-O-methyladenosine
  source 1..21: mol_type = other RNA
ctcctcaaatccactngatga

SEQ ID NO: 707 - RNA, 21 nt, synthetic construct
  modified_base 1: mod_base = gm
  modified_base 1^2: mod_base = OTHER; note = phosphorothioate linkage
  modified_base 2: mod_base = gm
  modified_base 3: mod_base = um
  modified_base 4: mod_base = OTHER; note = 2'-O-methyladenosine
  modified_base 5: mod_base = gm
  modified_base 6: mod_base = OTHER; note = 2'-O-methyladenosine
  modified_base 7: mod_base = um
  modified_base 8: mod_base = um
  modified_base 9: mod_base = OTHER; note = 2'-fluorocytidine
  modified_base 10: mod_base = OTHER; note = 2'-fluorouridine
  modified_base 11: mod_base = OTHER; note = 2'-fluoroguanosine
  modified_base 12: mod_base = cm
  modified_base 13: mod_base = cm
  modified_base 14: mod_base = um
  modified_base 15: mod_base = cm
  modified_base 16: mod_base = um
  modified_base 17: mod_base = OTHER; note = 2 -O-methylinosine
  modified_base 18: mod_base = OTHER; note = 2'-O-methyladenosine
  modified_base 19: mod_base = OTHER; note = 2'-O-methyladenosine
  modified_base 20: mod_base = cm
  modified_base 21: mod_base = um
  source 1..21: mol_type = other RNA
ggtagattctgcctctnaact

SEQ ID NO: 708 - RNA, 21 nt, synthetic construct
  modified_base 1: mod_base = um
  modified_base 1^2: mod_base = OTHER; note = phosphorothioate linkage
  modified_base 2: mod_base = OTHER; note = 2'-O-methyladenosine
  modified_base 3: mod_base = gm
  modified_base 4: mod_base = OTHER; note = 2'-O-methyladenosine
  modified_base 5: mod_base = um
  modified_base 6: mod_base = um
  modified_base 7: mod_base = cm
  modified_base 8: mod_base = um
  modified_base 9: mod_base = OTHER; note = 2'-fluoroguanosine
  modified_base 10: mod_base = OTHER; note = 2'-fluorocytidine
  modified_base 11: mod_base = OTHER; note = 2'-fluorocytidine
  modified_base 12: mod_base = um
  modified_base 13: mod_base = cm
  modified_base 14: mod_base = um
  modified_base 15: mod_base = gm
  modified_base 16: mod_base = OTHER; note = 2'-O-methyladenosine
  modified_base 17: mod_base = OTHER; note = 2'-O-methyladenosine
  modified_base 18: mod_base = cm
  modified_base 19: mod_base = um
  modified_base 20: mod_base = cm
  modified_base 21: mod_base = OTHER; note = 2'-O-methyladenosine
  source 1..21: mol_type = other RNA
tagattctgcctctgaactca

SEQ ID NO: 709 - RNA, 21 nt, synthetic construct
  modified_base 1: mod_base = gm
  modified_base 1^2: mod_base = OTHER; note = phosphorothioate linkage
  modified_base 2: mod_base = gm
  modified_base 3: mod_base = cm
  modified_base 4: mod_base = um
  modified_base 5: mod_base = gm
  modified_base 6: mod_base = gm
  modified_base 7: mod_base = um
  modified_base 8: mod_base = gm
  modified_base 9: mod_base = OTHER; note = 2'-fluorouridine
  modified_base 10: mod_base = OTHER; note = 2'-fluorouridine
  modified_base 11: mod_base = OTHER; note = 2'-fluorocytidine
  modified_base 12: mod_base = cm
  modified_base 13: mod_base = cm
  modified_base 14: mod_base = OTHER; note = 2'-O-methyladenosine
  modified_base 15: mod_base = OTHER; note = 2'-O-methyladenosine
  modified_base 16: mod_base = um
  modified_base 17: mod_base = OTHER; note = 2'-O-methyladenosine
  modified_base 18: mod_base = OTHER; note = 2'-O-methyladenosine
  modified_base 19: mod_base = gm
  modified_base 20: mod_base = gm
  modified_base 21: mod_base = um
  source 1..21: mol_type = other RNA
ggctggtgttcccaataaggt

SEQ ID NO: 710 - RNA, 21 nt, synthetic construct
  modified_base 1: mod_base = cm
  modified_base 1^2: mod_base = OTHER; note = phosphorothioate linkage
  modified_base 2: mod_base = um
  modified_base 3: mod_base = gm
  modified_base 4: mod_base = gm
  modified_base 5: mod_base = um
  modified_base 6: mod_base = gm
  modified_base 7: mod_base = um
  modified_base 8: mod_base = um
  modified_base 9: mod_base = OTHER; note = 2'-fluorocytidine
  modified_base 10: mod_base = OTHER; note = 2'-fluorocytidine
  modified_base 11: mod_base = OTHER; note = 2'-fluorocytidine
  modified_base 12: mod_base = OTHER; note = 2'-O-methyladenosine
  modified_base 13: mod_base = OTHER; note = 2'-O-methyladenosine
  modified_base 14: mod_base = um
  modified_base 15: mod_base = OTHER; note = 2'-O-methyladenosine
  modified_base 16: mod_base = OTHER; note = 2'-O-methyladenosine
  modified_base 17: mod_base = gm
  modified_base 18: mod_base = OTHER; note = 2 -O-methylinosine
  modified_base 19: mod_base = um
  modified_base 20: mod_base = gm
  modified_base 21: mod_base = OTHER; note = 2'-O-methyladenosine
  source 1..21: mol_type = other RNA
ctggtgttcccaataagntga

SEQ ID NO: 711 - RNA, 21 nt, synthetic construct
  modified_base 1: mod_base = gm
  modified_base 1^2: mod_base = OTHER; note = phosphorothioate linkage
  modified_base 2: mod_base = cm
  modified_base 3: mod_base = um
  modified_base 4: mod_base = um
  modified_base 5: mod_base = OTHER; note = 2'-O-methyladenosine
  modified_base 6: mod_base = gm
  modified_base 7: mod_base = cm
  modified_base 8: mod_base = um
  modified_base 9: mod_base = OTHER; note = 2'-fluoroguanosine
  modified_base 10: mod_base = OTHER; note = 2'-fluoroguanosine
  modified_base 11: mod_base = OTHER; note = 2'-fluorocytidine
  modified_base 12: mod_base = OTHER; note = 2'-O-methyladenosine
  modified_base 13: mod_base = cm
  modified_base 14: mod_base = um
  modified_base 15: mod_base = um
  modified_base 16: mod_base = OTHER; note = 2 -O-methylinosine
  modified_base 17: mod_base = gm
  modified_base 18: mod_base = OTHER; note = 2'-O-methyladenosine
  modified_base 19: mod_base = um
  modified_base 20: mod_base = gm
  modified_base 21: mod_base = OTHER; note = 2'-O-methyladenosine
  source 1..21: mol_type = other RNA
gcttagctggcacttngatga

SEQ ID NO: 712 - RNA, 21 nt, synthetic construct
  modified_base 1: mod_base = cm
  modified_base 1^2: mod_base = OTHER; note = phosphorothioate linkage
  modified_base 2: mod_base = cm
  modified_base 3: mod_base = um
  modified_base 4: mod_base = OTHER; note = 2'-O-methyladenosine
  modified_base 5: mod_base = OTHER; note = 2'-O-methyladenosine
  modified_base 6: mod_base = um
  modified_base 7: mod_base = gm
  modified_base 8: mod_base = OTHER; note = 2'-O-methyladenosine
  modified_base 9: mod_base = OTHER; note = 2'-fluoroguanosine
  modified_base 10: mod_base = OTHER; note = 2'-fluoroadenosine
  modified_base 11: mod_base = OTHER; note = 2'-fluoroadenosine
  modified_base 12: mod_base = gm
  modified_base 13: mod_base = gm
  modified_base 14: mod_base = gm
  modified_base 15: mod_base = OTHER; note = 2'-O-methyladenosine
  modified_base 16: mod_base = OTHER; note = 2 -O-methylinosine
  modified_base 17: mod_base = um
  modified_base 18: mod_base = OTHER; note = 2'-O-methyladenosine
  modified_base 19: mod_base = um
  modified_base 20: mod_base = cm
  modified_base 21: mod_base = um
  source 1..21: mol_type = other RNA
cctaatgagaagggantatct

SEQ ID NO: 713 - RNA, 21 nt, synthetic construct
  modified_base 1: mod_base = gm
  modified_base 1^2: mod_base = OTHER; note = phosphorothioate linkage
  modified_base 2: mod_base = um
  modified_base 3: mod_base = gm
  modified_base 4: mod_base = OTHER; note = 2'-O-methyladenosine
  modified_base 5: mod_base = gm
  modified_base 6: mod_base = OTHER; note = 2'-O-methyladenosine
  modified_base 7: mod_base = OTHER; note = 2'-O-methyladenosine
  modified_base 8: mod_base = gm
  modified_base 9: mod_base = OTHER; note = 2'-fluoroguanosine
  modified_base 10: mod_base = OTHER; note = 2'-fluoroguanosine
  modified_base 11: mod_base = OTHER; note = 2'-fluoroadenosine
  modified_base 12: mod_base = gm
  modified_base 13: mod_base = um
  modified_base 14: mod_base = OTHER; note = 2'-O-methyladenosine
  modified_base 15: mod_base = um
  modified_base 16: mod_base = cm
  modified_base 17: mod_base = um
  modified_base 18: mod_base = OTHER; note = 2 -O-methylinosine
  modified_base 19: mod_base = um
  modified_base 20: mod_base = gm
  modified_base 21: mod_base = OTHER; note = 2'-O-methyladenosine
  source 1..21: mol_type = other RNA
gtgagaagggagtatctntga

SEQ ID NO: 714 - RNA, 21 nt, synthetic construct
  modified_base 1: mod_base = cm
  modified_base 1^2: mod_base = OTHER; note = phosphorothioate linkage
  modified_base 2: mod_base = OTHER; note = 2'-O-methyladenosine
  modified_base 3: mod_base = gm
  modified_base 4: mod_base = cm
  modified_base 5: mod_base = OTHER; note = 2'-O-methyladenosine
  modified_base 6: mod_base = um
  modified_base 7: mod_base = cm
  modified_base 8: mod_base = OTHER; note = 2'-O-methyladenosine
  modified_base 9: mod_base = OTHER; note = 2'-fluoroguanosine
  modified_base 10: mod_base = OTHER; note = 2'-fluorocytidine
  modified_base 11: mod_base = OTHER; note = 2'-fluoroadenosine
  modified_base 12: mod_base = um
  modified_base 13: mod_base = cm
  modified_base 14: mod_base = OTHER; note = 2'-O-methyladenosine
  modified_base 15: mod_base = um
  modified_base 16: mod_base = cm
  modified_base 17: mod_base = OTHER; note = 2 -O-methylinosine
  modified_base 18: mod_base = OTHER; note = 2'-O-methyladenosine
  modified_base 19: mod_base = OTHER; note = 2'-O-methyladenosine
  modified_base 20: mod_base = cm
  modified_base 21: mod_base = OTHER; note = 2'-O-methyladenosine
  source 1..21: mol_type = other RNA
cagcatcagcatcatcnaaca

SEQ ID NO: 715 - RNA, 21 nt, synthetic construct
  modified_base 1: mod_base = cm
  modified_base 2: mod_base = gm
  modified_base 3: mod_base = gm
  modified_base 4: mod_base = OTHER; note = 2'-O-methyladenosine
  modified_base 5: mod_base = OTHER; note = 2'-O-methyladenosine
  modified_base 6: mod_base = um
  modified_base 7: mod_base = gm
  modified_base 8: mod_base = gm
  modified_base 9: mod_base = OTHER; note = 2'-fluoroadenosine
  modified_base 10: mod_base = OTHER; note = 2'-fluoroadenosine
  modified_base 11: mod_base = OTHER; note = 2'-fluoroadenosine
  modified_base 12: mod_base = cm
  modified_base 13: mod_base = um
  modified_base 14: mod_base = gm
  modified_base 15: mod_base = OTHER; note = 2'-O-methyladenosine
  modified_base 16: mod_base = OTHER; note = 2'-O-methyladenosine
  modified_base 17: mod_base = cm
  modified_base 18: mod_base = OTHER; note = 2'-O-methyladenosine
  modified_base 19: mod_base = cm
  modified_base 20: mod_base = OTHER; note = 2'-O-methyladenosine
  modified_base 21: mod_base = OTHER; note = 2'-O-methyladenosine
  source 1..21: mol_type = other RNA
cggaatggaaactgaacacaa

SEQ ID NO: 716 - RNA, 21 nt, synthetic construct
  modified_base 1: mod_base = cm
  modified_base 1^2: mod_base = OTHER; note = phosphorothioate linkage
  modified_base 2: mod_base = gm
  modified_base 3: mod_base = gm
  modified_base 4: mod_base = OTHER; note = 2'-O-methyladenosine
  modified_base 5: mod_base = OTHER; note = 2'-O-methyladenosine
  modified_base 6: mod_base = um
  modified_base 7: mod_base = gm
  modified_base 8: mod_base = gm
  modified_base 9: mod_base = OTHER; note = 2'-fluoroadenosine
  modified_base 10: mod_base = OTHER; note = 2'-fluoroadenosine
  modified_base 11: mod_base = OTHER; note = 2'-fluoroadenosine
  modified_base 12: mod_base = cm
  modified_base 13: mod_base = um
  modified_base 14: mod_base = gm
  modified_base 15: mod_base = OTHER; note = 2'-O-methyladenosine
  modified_base 16: mod_base = OTHER; note = 2'-O-methyladenosine
  modified_base 17: mod_base = cm
  modified_base 18: mod_base = OTHER; note = 2'-O-methyladenosine
  modified_base 19: mod_base = cm
  modified_base 20: mod_base = OTHER; note = 2'-O-methyladenosine
  modified_base 21: mod_base = OTHER; note = 2'-O-methyladenosine
  source 1..21: mol_type = other RNA
cggaatggaaactgaacacaa

SEQ ID NO: 717 - RNA, 21 nt, synthetic construct
  modified_base 1: mod_base = cm
  modified_base 2: mod_base = gm
  modified_base 3: mod_base = gm
  modified_base 4: mod_base = OTHER; note = 2'-O-methyladenosine
  modified_base 5: mod_base = OTHER; note = 2'-O-methyladenosine
  modified_base 6: mod_base = um
  modified_base 7: mod_base = gm
  modified_base 8: mod_base = gm
  modified_base 9: mod_base = OTHER; note = 2'-fluoroadenosine
  modified_base 10: mod_base = OTHER; note = 2'-fluoroadenosine
  modified_base 11: mod_base = OTHER; note = 2'-fluoroadenosine
  modified_base 12: mod_base = cm
  modified_base 13: mod_base = um
  modified_base 14: mod_base = gm
  modified_base 15: mod_base = OTHER; note = 2'-O-methyladenosine
  modified_base 16: mod_base = OTHER; note = 2'-O-methyladenosine
  modified_base 17: mod_base = cm
  modified_base 18: mod_base = OTHER; note = 2'-O-methyladenosine
  modified_base 19: mod_base = cm
  modified_base 20: mod_base = OTHER; note = 2'-O-methyladenosine
  modified_base 21: mod_base = OTHER; note = 2'-O-methyladenosine
  source 1..21: mol_type = other RNA
cggaatggaaactgaacacaa

SEQ ID NO: 718 - RNA, 21 nt, synthetic construct
  modified_base 1: mod_base = cm
  modified_base 1^2: mod_base = OTHER; note = phosphorothioate linkage
  modified_base 2: mod_base = gm
  modified_base 3: mod_base = gm
  modified_base 4: mod_base = OTHER; note = 2'-O-methyladenosine
  modified_base 5: mod_base = OTHER; note = 2'-O-methyladenosine
  modified_base 6: mod_base = um
  modified_base 7: mod_base = OTHER; note = 2'-fluoroguanosine
  modified_base 8: mod_base = gm
  modified_base 9: mod_base = OTHER; note = 2'-fluoroadenosine
  modified_base 10: mod_base = OTHER; note = 2'-O-methyladenosine
  modified_base 11: mod_base = OTHER; note = 2'-fluoroadenosine
  modified_base 12: mod_base = cm
  modified_base 13: mod_base = um
  modified_base 14: mod_base = gm
  modified_base 15: mod_base = OTHER; note = 2'-O-methyladenosine
  modified_base 16: mod_base = OTHER; note = 2'-O-methyladenosine
  modified_base 17: mod_base = um
  modified_base 18: mod_base = OTHER; note = 2'-O-methyladenosine
  modified_base 19: mod_base = cm
  modified_base 20: mod_base = OTHER; note = 2'-O-methyladenosine
  modified_base 21: mod_base = OTHER; note = 2'-O-methyladenosine
  source 1..21: mol_type = other RNA
cggaatggaaactgaatacaa

SEQ ID NO: 719 - RNA, 21 nt, synthetic construct
  modified_base 1: mod_base = gm
  modified_base 1^2: mod_base = OTHER; note = phosphorothioate linkage
  modified_base 2: mod_base = gm
  modified_base 3: mod_base = gm
  modified_base 4: mod_base = OTHER; note = 2'-O-methyladenosine
  modified_base 5: mod_base = OTHER; note = 2'-O-methyladenosine
  modified_base 6: mod_base = um
  modified_base 7: mod_base = OTHER; note = 2'-fluoroguanosine
  modified_base 8: mod_base = gm
  modified_base 9: mod_base = OTHER; note = 2'-fluoroadenosine
  modified_base 10: mod_base = OTHER; note = 2'-O-methyladenosine
  modified_base 11: mod_base = OTHER; note = 2'-fluoroadenosine
  modified_base 12: mod_base = cm
  modified_base 13: mod_base = um
  modified_base 14: mod_base = gm
  modified_base 15: mod_base = OTHER; note = 2'-O-methyladenosine
  modified_base 16: mod_base = OTHER; note = 2'-O-methyladenosine
  modified_base 17: mod_base = cm
  modified_base 18: mod_base = OTHER; note = 2'-O-methyladenosine
  modified_base 19: mod_base = cm
  modified_base 20: mod_base = OTHER; note = 2'-O-methyladenosine
  modified_base 21: mod_base = OTHER; note = 2'-O-methyladenosine
  source 1..21: mol_type = other RNA
gggaatggaaactgaacacaa

SEQ ID NO: 720 - RNA, 21 nt, synthetic construct
  modified_base 1: mod_base = um
  modified_base 1^2: mod_base = OTHER; note = phosphorothioate linkage
  modified_base 2: mod_base = gm
  modified_base 3: mod_base = gm
  modified_base 4: mod_base = OTHER; note = 2'-O-methyladenosine
  modified_base 5: mod_base = OTHER; note = 2'-O-methyladenosine
  modified_base 6: mod_base = um
  modified_base 7: mod_base = OTHER; note = 2'-fluoroguanosine
  modified_base 8: mod_base = gm
  modified_base 9: mod_base = OTHER; note = 2'-fluoroadenosine
  modified_base 10: mod_base = OTHER; note = 2'-O-methyladenosine
  modified_base 11: mod_base = OTHER; note = 2'-fluoroadenosine
  modified_base 12: mod_base = cm
  modified_base 13: mod_base = um
  modified_base 14: mod_base = gm
  modified_base 15: mod_base = OTHER; note = 2'-O-methyladenosine
  modified_base 16: mod_base = OTHER; note = 2'-O-methyladenosine
  modified_base 17: mod_base = cm
  modified_base 18: mod_base = OTHER; note = 2'-O-methyladenosine
  modified_base 19: mod_base = cm
  modified_base 20: mod_base = OTHER; note = 2'-O-methyladenosine
  modified_base 21: mod_base = OTHER; note = 2'-O-methyladenosine
  source 1..21: mol_type = other RNA
tggaatggaaactgaacacaa

SEQ ID NO: 721 - RNA, 21 nt, synthetic construct
  modified_base 1: mod_base = cm
  modified_base 1^2: mod_base = OTHER; note = phosphorothioate linkage
  modified_base 2: mod_base = gm
  modified_base 3: mod_base = gm
  modified_base 4: mod_base = OTHER; note = 2'-O-methyladenosine
  modified_base 5: mod_base = OTHER; note = 2'-O-methyladenosine
  modified_base 6: mod_base = um
  modified_base 7: mod_base = OTHER; note = 2'-fluoroguanosine
  modified_base 8: mod_base = gm
  modified_base 9: mod_base = OTHER; note = 2'-fluoroadenosine
  modified_base 10: mod_base = OTHER; note = 2-aminoadenine
  modified_base 11: mod_base = OTHER; note = 2'-fluoroadenosine
  modified_base 12: mod_base = cm
  modified_base 13: mod_base = um
  modified_base 14: mod_base = gm
  modified_base 15: mod_base = OTHER; note = 2'-O-methyladenosine
  modified_base 16: mod_base = OTHER; note = 2'-O-methyladenosine
  modified_base 17: mod_base = cm
  modified_base 18: mod_base = OTHER; note = 2'-O-methyladenosine
  modified_base 19: mod_base = cm
  modified_base 20: mod_base = OTHER; note = 2'-O-methyladenosine
  modified_base 21: mod_base = OTHER; note = 2'-O-methyladenosine
  source 1..21: mol_type = other RNA
cggaatggaaactgaacacaa

SEQ ID NO: 722 - RNA, 21 nt, synthetic construct
  modified_base 1: mod_base = cm
  modified_base 2: mod_base = gm
  modified_base 3: mod_base = gm
  modified_base 4: mod_base = OTHER; note = 2'-O-methyladenosine
  modified_base 5: mod_base = OTHER; note = 2'-O-methyladenosine
  modified_base 6: mod_base = um
  modified_base 7: mod_base = gm
  modified_base 8: mod_base = gm
  modified_base 9: mod_base = OTHER; note = 2'-fluoroadenosine
  modified_base 10: mod_base = OTHER; note = 2'-fluoroadenosine
  modified_base 11: mod_base = OTHER; note = 2'-fluoroadenosine
  modified_base 12: mod_base = cm
  modified_base 13: mod_base = um
  modified_base 14: mod_base = gm
  modified_base 15: mod_base = OTHER; note = 2'-O-methyladenosine
  modified_base 16: mod_base = OTHER; note = 2'-O-methyladenosine
  modified_base 17: mod_base = cm
  modified_base 18: mod_base = OTHER; note = 2'-O-methyladenosine
  modified_base 19: mod_base = cm
  modified_base 20: mod_base = OTHER; note = 2'-O-methyladenosine
  modified_base 21: mod_base = OTHER; note = 2'-O-methyladenosine
  source 1..21: mol_type = other RNA
cggaatggaaactgaacacaa

SEQ ID NO: 723 - RNA, 21 nt, synthetic construct
  modified_base 1: mod_base = cm
  modified_base 1^2: mod_base = OTHER; note = phosphorothioate linkage
  modified_base 2: mod_base = gm
  modified_base 3: mod_base = gm
  modified_base 4: mod_base = OTHER; note = 2'-O-methyladenosine
  modified_base 5: mod_base = OTHER; note = 2'-O-methyladenosine
  modified_base 6: mod_base = um
  modified_base 7: mod_base = gm
  modified_base 8: mod_base = gm
  modified_base 9: mod_base = OTHER; note = 2'-fluoroadenosine
  modified_base 10: mod_base = OTHER; note = 2'-fluoroadenosine
  modified_base 11: mod_base = OTHER; note = 2'-fluoroadenosine
  modified_base 12: mod_base = cm
  modified_base 13: mod_base = um
  modified_base 14: mod_base = gm
  modified_base 15: mod_base = OTHER; note = 2'-O-methyladenosine
  modified_base 16: mod_base = OTHER; note = 2'-O-methyladenosine
  modified_base 17: mod_base = cm
  modified_base 18: mod_base = OTHER; note = 2'-O-methyladenosine
  modified_base 19: mod_base = cm
  modified_base 20: mod_base = OTHER; note = 2'-O-methyladenosine
  modified_base 21: mod_base = OTHER; note = 2'-O-methyladenosine
  source 1..21: mol_type = other RNA
cggaatggaaactgaacacaa

SEQ ID NO: 724 - RNA, 21 nt, synthetic construct
  modified_base 1: mod_base = cm
  modified_base 1^2: mod_base = OTHER; note = phosphorothioate linkage
  modified_base 2: mod_base = gm
  modified_base 3: mod_base = gm
  modified_base 4: mod_base = OTHER; note = 2'-O-methyladenosine
  modified_base 5: mod_base = OTHER; note = 2'-O-methyladenosine
  modified_base 6: mod_base = um
  modified_base 7: mod_base = gm
  modified_base 8: mod_base = gm
  modified_base 9: mod_base = OTHER; note = 2'-fluoroadenosine
  modified_base 10: mod_base = OTHER; note = 2'-fluoroadenosine
  modified_base 11: mod_base = OTHER; note = 2'-fluoroadenosine
  modified_base 12: mod_base = cm
  modified_base 13: mod_base = um
  modified_base 14: mod_base = gm
  modified_base 15: mod_base = OTHER; note = 2'-O-methyladenosine
  modified_base 16: mod_base = OTHER; note = 2'-O-methyladenosine
  modified_base 17: mod_base = cm
  modified_base 18: mod_base = OTHER; note = 2'-O-methyladenosine
  modified_base 19: mod_base = cm
  modified_base 20: mod_base = OTHER; note = 2'-O-methyladenosine
  modified_base 21: mod_base = OTHER; note = 2'-O-methyladenosine
  source 1..21: mol_type = other RNA
cggaatggaaactgaacacaa

SEQ ID NO: 725 - RNA, 21 nt, synthetic construct
  modified_base 1: mod_base = cm
  modified_base 2: mod_base = gm
  modified_base 3: mod_base = gm
  modified_base 4: mod_base = OTHER; note = 2'-O-methyladenosine
  modified_base 5: mod_base = OTHER; note = 2'-O-methyladenosine
  modified_base 6: mod_base = um
  modified_base 7: mod_base = gm
  modified_base 8: mod_base = gm
  modified_base 9: mod_base = OTHER; note = 2'-fluoroadenosine
  modified_base 10: mod_base = OTHER; note = 2'-fluoroadenosine
  modified_base 11: mod_base = OTHER; note = 2'-fluoroadenosine
  modified_base 12: mod_base = cm
  modified_base 13: mod_base = um
  modified_base 14: mod_base = gm
  modified_base 15: mod_base = OTHER; note = 2'-O-methyladenosine
  modified_base 16: mod_base = OTHER; note = 2'-O-methyladenosine
  modified_base 17: mod_base = cm
  modified_base 18: mod_base = OTHER; note = 2'-O-methyladenosine
  modified_base 19: mod_base = cm
  modified_base 20: mod_base = OTHER; note = 2'-O-methyladenosine
  modified_base 21: mod_base = OTHER; note = 2'-O-methyladenosine
  source 1..21: mol_type = other RNA
cggaatggaaactgaacacaa

SEQ ID NO: 726 - RNA, 21 nt, synthetic construct
  modified_base 1: mod_base = cm
  modified_base 1^2: mod_base = OTHER; note = phosphorothioate linkage
  modified_base 2: mod_base = gm
  modified_base 3: mod_base = gm
  modified_base 4: mod_base = OTHER; note = 2'-O-methyladenosine
  modified_base 5: mod_base = OTHER; note = 2'-O-methyladenosine
  modified_base 6: mod_base = um
  modified_base 7: mod_base = gm
  modified_base 8: mod_base = gm
  modified_base 9: mod_base = OTHER; note = 2'-fluoroadenosine
  modified_base 10: mod_base = OTHER; note = 2'-fluoroadenosine
  modified_base 11: mod_base = OTHER; note = 2'-fluoroadenosine
  modified_base 12: mod_base = cm
  modified_base 13: mod_base = um
  modified_base 14: mod_base = gm
  modified_base 15: mod_base = OTHER; note = 2'-O-methyladenosine
  modified_base 16: mod_base = OTHER; note = 2'-O-methyladenosine
  modified_base 17: mod_base = cm
  modified_base 18: mod_base = OTHER; note = 2'-O-methyladenosine
  modified_base 19: mod_base = cm
  modified_base 20: mod_base = OTHER; note = 2'-O-methyladenosine
  modified_base 21: mod_base = OTHER; note = 2'-O-methyladenosine
  source 1..21: mol_type = other RNA
cggaatggaaactgaacacaa

SEQ ID NO: 727 - RNA, 21 nt, synthetic construct
  modified_base 1: mod_base = cm
  modified_base 2: mod_base = gm
  modified_base 3: mod_base = gm
  modified_base 4: mod_base = OTHER; note = 2'-O-methyladenosine
  modified_base 5: mod_base = OTHER; note = 2'-O-methyladenosine
  modified_base 6: mod_base = um
  modified_base 7: mod_base = gm
  modified_base 8: mod_base = gm
  modified_base 9: mod_base = OTHER; note = 2'-fluoroadenosine
  modified_base 10: mod_base = OTHER; note = 2'-fluoroadenosine
  modified_base 11: mod_base = OTHER; note = 2'-fluoroadenosine
  modified_base 12: mod_base = cm
  modified_base 13: mod_base = um
  modified_base 14: mod_base = gm
  modified_base 15: mod_base = OTHER; note = 2'-O-methyladenosine
  modified_base 16: mod_base = OTHER; note = 2'-O-methyladenosine
  modified_base 17: mod_base = cm
  modified_base 18: mod_base = OTHER; note = 2'-O-methyladenosine
  modified_base 19: mod_base = cm
  modified_base 20: mod_base = OTHER; note = 2'-O-methyladenosine
  modified_base 21: mod_base = OTHER; note = 2'-O-methyladenosine
  source 1..21: mol_type = other RNA
cggaatggaaactgaacacaa

SEQ ID NO: 728 - RNA, 21 nt, synthetic construct
  modified_base 1: mod_base = gm
  modified_base 1^2: mod_base = OTHER; note = phosphorothioate linkage
  modified_base 2: mod_base = OTHER; note = 2'-O-methyladenosine
  modified_base 3: mod_base = um
  modified_base 4: mod_base = gm
  modified_base 5: mod_base = OTHER; note = 2'-O-methyladenosine
  modified_base 6: mod_base = OTHER; note = 2'-O-methyladenosine
  modified_base 7: mod_base = cm
  modified_base 8: mod_base = OTHER; note = 2'-O-methyladenosine
  modified_base 9: mod_base = OTHER; note = 2'-fluoroguanosine
  modified_base 10: mod_base = OTHER; note = 2'-fluoroguanosine
  modified_base 11: mod_base = OTHER; note = 2'-fluoroadenosine
  modified_base 12: mod_base = OTHER; note = 2'-O-methyladenosine
  modified_base 13: mod_base = um
  modified_base 14: mod_base = gm
  modified_base 15: mod_base = gm
  modified_base 16: mod_base = OTHER; note = 2'-O-methyladenosine
  modified_base 17: mod_base = OTHER; note = 2'-O-methyladenosine
  modified_base 18: mod_base = OTHER; note = 2'-O-methyladenosine
  modified_base 19: mod_base = gm
  modified_base 20: mod_base = gm
  modified_base 21: mod_base = OTHER; note = 2'-O-methyladenosine
  source 1..21: mol_type = other RNA
gatgaacaggaatggaaagga

SEQ ID NO: 729 - RNA, 21 nt, synthetic construct
  modified_base 1: mod_base = gm
  modified_base 1^2: mod_base = OTHER; note = phosphorothioate linkage
  modified_base 2: mod_base = OTHER; note = 2'-O-methyladenosine
  modified_base 3: mod_base = um
  modified_base 4: mod_base = gm
  modified_base 5: mod_base = OTHER; note = 2'-O-methyladenosine
  modified_base 6: mod_base = OTHER; note = 2'-O-methyladenosine
  modified_base 7: mod_base = cm
  modified_base 8: mod_base = OTHER; note = 2'-O-methyladenosine
  modified_base 9: mod_base = OTHER; note = 2'-fluoroguanosine
  modified_base 10: mod_base = OTHER; note = 2'-fluoroguanosine
  modified_base 11: mod_base = OTHER; note = 2'-fluoroadenosine
  modified_base 12: mod_base = OTHER; note = 2'-O-methyladenosine
  modified_base 13: mod_base = um
  modified_base 14: mod_base = gm
  modified_base 15: mod_base = gm
  modified_base 16: mod_base = OTHER; note = 2'-O-methyladenosine
  modified_base 17: mod_base = OTHER; note = 2'-O-methyladenosine
  modified_base 18: mod_base = OTHER; note = 2'-O-methyladenosine
  modified_base 19: mod_base = gm
  modified_base 20: mod_base = OTHER; note = 2 -O-methylinosine
  modified_base 21: mod_base = OTHER; note = 2'-O-methyladenosine
  source 1..21: mol_type = other RNA
gatgaacaggaatggaaagna

SEQ ID NO: 730 - RNA, 21 nt, synthetic construct
  modified_base 1: mod_base = gm
  modified_base 1^2: mod_base = OTHER; note = phosphorothioate linkage
  modified_base 2: mod_base = OTHER; note = 2'-O-methyladenosine
  modified_base 3: mod_base = cm
  modified_base 4: mod_base = um
  modified_base 5: mod_base = OTHER; note = 2'-O-methyladenosine
  modified_base 6: mod_base = cm
  modified_base 7: mod_base = cm
  modified_base 8: mod_base = gm
  modified_base 9: mod_base = OTHER; note = 2'-fluoroadenosine
  modified_base 10: mod_base = OTHER; note = 2'-fluoroguanosine
  modified_base 11: mod_base = OTHER; note = 2'-fluorouridine
  modified_base 12: mod_base = cm
  modified_base 13: mod_base = cm
  modified_base 14: mod_base = gm
  modified_base 15: mod_base = um
  modified_base 16: mod_base = gm
  modified_base 17: mod_base = um
  modified_base 18: mod_base = cm
  modified_base 19: mod_base = um
  modified_base 20: mod_base = OTHER; note = 2'-O-methyladenosine
  modified_base 21: mod_base = OTHER; note = 2'-O-methyladenosine
  source 1..21: mol_type = other RNA
gactaccgagtccgtgtctaa

SEQ ID NO: 731 - RNA, 21 nt, synthetic construct
  modified_base 1: mod_base = um
  modified_base 1^2: mod_base = OTHER; note = phosphorothioate linkage
  modified_base 2: mod_base = gm
  modified_base 3: mod_base = cm
  modified_base 4: mod_base = cm
  modified_base 5: mod_base = um
  modified_base 6: mod_base = OTHER; note = 2'-O-methyladenosine
  modified_base 7: mod_base = OTHER; note = 2'-O-methyladenosine
  modified_base 8: mod_base = um
  modified_base 9: mod_base = OTHER; note = 2'-fluoroguanosine
  modified_base 10: mod_base = OTHER; note = 2'-fluoroadenosine
  modified_base 11: mod_base = OTHER; note = 2'-fluoroguanosine
  modified_base 12: mod_base = OTHER; note = 2'-O-methyladenosine
  modified_base 13: mod_base = OTHER; note = 2'-O-methyladenosine
  modified_base 14: mod_base = gm
  modified_base 15: mod_base = gm
  modified_base 16: mod_base = gm
  modified_base 17: mod_base = OTHER; note = 2'-O-methyladenosine
  modified_base 18: mod_base = gm
  modified_base 19: mod_base = um
  modified_base 20: mod_base = OTHER; note = 2'-O-methyladenosine
  modified_base 21: mod_base = um
  source 1..21: mol_type = other RNA
tgcctaatgagaagggagtat

SEQ ID NO: 732 - RNA, 21 nt, synthetic construct
  modified_base 1: mod_base = gm
  modified_base 1^2: mod_base = OTHER; note = phosphorothioate linkage
  modified_base 2: mod_base = OTHER; note = 2'-O-methyladenosine
  modified_base 3: mod_base = gm
  modified_base 4: mod_base = um
  modified_base 5: mod_base = OTHER; note = 2'-O-methyladenosine
  modified_base 6: mod_base = gm
  modified_base 7: mod_base = gm
  modified_base 8: mod_base = um
  modified_base 9: mod_base = OTHER; note = 2'-fluoroguanosine
  modified_base 10: mod_base = cm
  modified_base 11: mod_base = OTHER; note = 2'-fluorouridine
  modified_base 12: mod_base = cm
  modified_base 13: mod_base = OTHER; note = 2'-fluoroadenosine
  modified_base 14: mod_base = OTHER; note = 2'-O-methyladenosine
  modified_base 15: mod_base = OTHER; note = 2'-O-methyladenosine
  modified_base 16: mod_base = OTHER; note = 2'-O-methyladenosine
  modified_base 17: mod_base = cm
  modified_base 18: mod_base = OTHER; note = 2'-O-methyladenosine
  modified_base 19: mod_base = um
  modified_base 20: mod_base = cm
  modified_base 21: mod_base = OTHER; note = 2'-O-methyladenosine
  source 1..21: mol_type = other RNA
gagtaggtgctcaaaacatca

SEQ ID NO: 733 - RNA, 21 nt, synthetic construct
  modified_base 1: mod_base = gm
  modified_base 1^2: mod_base = OTHER; note = phosphorothioate linkage
  modified_base 2: mod_base = OTHER; note = 2'-O-methyladenosine
  modified_base 3: mod_base = gm
  modified_base 4: mod_base = um
  modified_base 5: mod_base = OTHER; note = 2'-O-methyladenosine
  modified_base 6: mod_base = gm
  modified_base 7: mod_base = OTHER; note = 2 -O-methylinosine
  modified_base 8: mod_base = um
  modified_base 9: mod_base = OTHER; note = 2'-fluoroguanosine
  modified_base 10: mod_base = cm
  modified_base 11: mod_base = OTHER; note = 2'-fluorouridine
  modified_base 12: mod_base = cm
  modified_base 13: mod_base = OTHER; note = 2'-fluoroadenosine
  modified_base 14: mod_base = OTHER; note = 2'-O-methyladenosine
  modified_base 15: mod_base = OTHER; note = 2'-O-methyladenosine
  modified_base 16: mod_base = OTHER; note = 2'-O-methyladenosine
  modified_base 17: mod_base = cm
  modified_base 18: mod_base = OTHER; note = 2'-O-methyladenosine
  modified_base 19: mod_base = um
  modified_base 20: mod_base = cm
  modified_base 21: mod_base = OTHER; note = 2'-O-methyladenosine
  source 1..21: mol_type = other RNA
gagtagntgctcaaaacatca

SEQ ID NO: 734 - RNA, 21 nt, synthetic construct
  modified_base 1: mod_base = gm
  modified_base 1^2: mod_base = OTHER; note = phosphorothioate linkage
  modified_base 2: mod_base = OTHER; note = 2'-O-methyladenosine
  modified_base 3: mod_base = gm
  modified_base 4: mod_base = um
  modified_base 5: mod_base = OTHER; note = 2'-O-methyladenosine
  modified_base 6: mod_base = gm
  modified_base 7: mod_base = OTHER; note = 2'-fluoroguanosine
  modified_base 8: mod_base = um
  modified_base 9: mod_base = OTHER; note = 2'-fluoroguanosine
  modified_base 10: mod_base = cm
  modified_base 11: mod_base = OTHER; note = 2'-fluorouridine
  modified_base 12: mod_base = cm
  modified_base 13: mod_base = OTHER; note = 2'-O-methyladenosine
  modified_base 14: mod_base = OTHER; note = 2'-O-methyladenosine
  modified_base 15: mod_base = OTHER; note = 2'-O-methyladenosine
  modified_base 16: mod_base = OTHER; note = 2'-O-methyladenosine
  modified_base 17: mod_base = cm
  modified_base 18: mod_base = OTHER; note = 2'-O-methyladenosine
  modified_base 19: mod_base = um
  modified_base 20: mod_base = cm
  modified_base 21: mod_base = OTHER; note = 2'-O-methyladenosine
  source 1..21: mol_type = other RNA
gagtaggtgctcaaaacatca

SEQ ID NO: 735 - RNA, 21 nt, synthetic construct
  modified_base 1: mod_base = gm
  modified_base 1^2: mod_base = OTHER; note = phosphorothioate linkage
  modified_base 2: mod_base = OTHER; note = 2'-O-methyladenosine
  modified_base 3: mod_base = gm
  modified_base 4: mod_base = um
  modified_base 5: mod_base = OTHER; note = 2'-O-methyladenosine
  modified_base 6: mod_base = gm
  modified_base 7: mod_base = gm
  modified_base 8: mod_base = um
  modified_base 9: mod_base = OTHER; note = 2'-fluoroguanosine
  modified_base 10: mod_base = cm
  modified_base 11: mod_base = OTHER; note = 2'-fluorouridine
  modified_base 12: mod_base = cm
  modified_base 13: mod_base = OTHER; note = 2'-O-methyladenosine
  modified_base 14: mod_base = OTHER; note = 2'-O-methyladenosine
  modified_base 15: mod_base = OTHER; note = 2'-O-methyladenosine
  modified_base 16: mod_base = OTHER; note = 2'-O-methyladenosine
  modified_base 17: mod_base = cm
  modified_base 18: mod_base = OTHER; note = 2'-O-methyladenosine
  modified_base 19: mod_base = um
  modified_base 20: mod_base = cm
  modified_base 21: mod_base = OTHER; note = 2'-O-methyladenosine
  source 1..21: mol_type = other RNA
gagtaggtgctcaaaacatca

SEQ ID NO: 736 - RNA, 21 nt, synthetic construct
  modified_base 1: mod_base = OTHER; note = 2'-O-methyladenosine
  modified_base 1^2: mod_base = OTHER; note = phosphorothioate linkage
  modified_base 2: mod_base = gm
  modified_base 3: mod_base = gm
  modified_base 4: mod_base = cm
  modified_base 5: mod_base = OTHER; note = 2'-O-methyladenosine
  modified_base 6: mod_base = OTHER; note = 2'-O-methyladenosine
  modified_base 7: mod_base = OTHER; note = 2'-fluorouridine
  modified_base 8: mod_base = gm
  modified_base 9: mod_base = OTHER; note = 2'-fluoroadenosine
  modified_base 10: mod_base = OTHER; note = 2'-O-methyladenosine
  modified_base 11: mod_base = OTHER; note = 2'-fluorocytidine
  modified_base 12: mod_base = OTHER; note = 2'-O-methyladenosine
  modified_base 13: mod_base = gm
  modified_base 14: mod_base = gm
  modified_base 15: mod_base = OTHER; note = 2'-O-methyladenosine
  modified_base 16: mod_base = OTHER; note = 2'-O-methyladenosine
  modified_base 17: mod_base = um
  modified_base 18: mod_base = OTHER; note = 2 -O-methylinosine
  modified_base 19: mod_base = gm
  modified_base 20: mod_base = OTHER; note = 2'-O-methyladenosine
  modified_base 21: mod_base = OTHER; note = 2'-O-methyladenosine
  source 1..21: mol_type = other RNA
aggcaatgaacaggaatngaa

SEQ ID NO: 737 - RNA, 21 nt, synthetic construct
  modified_base 1: mod_base = OTHER; note = 2'-O-methyladenosine
  modified_base 1^2: mod_base = OTHER; note = phosphorothioate linkage
  modified_base 2: mod_base = gm
  modified_base 3: mod_base = gm
  modified_base 4: mod_base = cm
  modified_base 5: mod_base = OTHER; note = 2'-O-methyladenosine
  modified_base 6: mod_base = OTHER; note = 2'-O-methyladenosine
  modified_base 7: mod_base = OTHER; note = 2'-fluorouridine
  modified_base 8: mod_base = gm
  modified_base 9: mod_base = OTHER; note = 2'-fluoroadenosine
  modified_base 10: mod_base = OTHER; note = 2'-O-methyladenosine
  modified_base 11: mod_base = OTHER; note = 2'-fluorocytidine
  modified_base 12: mod_base = OTHER; note = 2'-O-methyladenosine
  modified_base 13: mod_base = gm
  modified_base 14: mod_base = gm
  modified_base 15: mod_base = OTHER; note = 2'-O-methyladenosine
  modified_base 16: mod_base = OTHER; note = 2'-O-methyladenosine
  modified_base 17: mod_base = um
  modified_base 18: mod_base = gm
  modified_base 19: mod_base = gm
  modified_base 20: mod_base = OTHER; note = 2'-O-methyladenosine
  modified_base 21: mod_base = OTHER; note = 2'-O-methyladenosine
  source 1..21: mol_type = other RNA
aggcaatgaacaggaatggaa

SEQ ID NO: 738 - RNA, 21 nt, synthetic construct
  modified_base 1: mod_base = OTHER; note = 2'-O-methyladenosine
  modified_base 1^2: mod_base = OTHER; note = phosphorothioate linkage
  modified_base 2: mod_base = gm
  modified_base 3: mod_base = gm
  modified_base 4: mod_base = cm
  modified_base 5: mod_base = OTHER; note = 2'-O-methyladenosine
  modified_base 6: mod_base = OTHER; note = 2'-O-methyladenosine
  modified_base 7: mod_base = OTHER; note = 2'-fluorouridine
  modified_base 8: mod_base = gm
  modified_base 9: mod_base = OTHER; note = 2'-fluoroadenosine
  modified_base 10: mod_base = OTHER; note = 2'-O-methyladenosine
  modified_base 11: mod_base = OTHER; note = 2'-fluorocytidine
  modified_base 12: mod_base = OTHER; note = 2'-O-methyladenosine
  modified_base 13: mod_base = gm
  modified_base 14: mod_base = gm
  modified_base 15: mod_base = OTHER; note = 2'-O-methyladenosine
  modified_base 16: mod_base = OTHER; note = 2'-O-methyladenosine
  modified_base 17: mod_base = um
  modified_base 18: mod_base = gm
  modified_base 19: mod_base = OTHER; note = 2 -O-methylinosine
  modified_base 20: mod_base = OTHER; note = 2'-O-methyladenosine
  modified_base 21: mod_base = OTHER; note = 2'-O-methyladenosine
  source 1..21: mol_type = other RNA
aggcaatgaacaggaatgnaa

SEQ ID NO: 739 - RNA, 21 nt, synthetic construct
  modified_base 1: mod_base = OTHER; note = 2'-O-methyladenosine
  modified_base 1^2: mod_base = OTHER; note = phosphorothioate linkage
  modified_base 2: mod_base = gm
  modified_base 3: mod_base = gm
  modified_base 4: mod_base = cm
  modified_base 5: mod_base = OTHER; note = 2'-O-methyladenosine
  modified_base 6: mod_base = OTHER; note = 2'-O-methyladenosine
  modified_base 7: mod_base = OTHER; note = 2'-fluorouridine
  modified_base 8: mod_base = gm
  modified_base 9: mod_base = OTHER; note = 2'-fluoroadenosine
  modified_base 10: mod_base = OTHER; note = 2'-O-methyladenosine
  modified_base 11: mod_base = OTHER; note = 2'-fluorocytidine
  modified_base 12: mod_base = OTHER; note = 2'-O-methyladenosine
  modified_base 13: mod_base = gm
  modified_base 14: mod_base = OTHER; note = 2 -O-methylinosine
  modified_base 15: mod_base = OTHER; note = 2'-O-methyladenosine
  modified_base 16: mod_base = OTHER; note = 2'-O-methyladenosine
  modified_base 17: mod_base = um
  modified_base 18: mod_base = gm
  modified_base 19: mod_base = gm
  modified_base 20: mod_base = OTHER; note = 2'-O-methyladenosine
  modified_base 21: mod_base = OTHER; note = 2'-O-methyladenosine
  source 1..21: mol_type = other RNA
aggcaatgaacagnaatggaa

SEQ ID NO: 740 - RNA, 21 nt, synthetic construct
  modified_base 1: mod_base = OTHER; note = 2'-O-methyladenosine
  modified_base 1^2: mod_base = OTHER; note = phosphorothioate linkage
  modified_base 2: mod_base = gm
  modified_base 3: mod_base = gm
  modified_base 4: mod_base = cm
  modified_base 5: mod_base = OTHER; note = 2'-O-methyladenosine
  modified_base 6: mod_base = OTHER; note = 2'-O-methyladenosine
  modified_base 7: mod_base = OTHER; note = 2'-fluorouridine
  modified_base 8: mod_base = gm
  modified_base 9: mod_base = OTHER; note = 2'-fluoroadenosine
  modified_base 10: mod_base = OTHER; note = 2'-O-methyladenosine
  modified_base 11: mod_base = OTHER; note = 2'-fluorocytidine
  modified_base 12: mod_base = OTHER; note = 2'-O-methyladenosine
  modified_base 13: mod_base = OTHER; note = 2 -O-methylinosine
  modified_base 14: mod_base = gm
  modified_base 15: mod_base = OTHER; note = 2'-O-methyladenosine
  modified_base 16: mod_base = OTHER; note = 2'-O-methyladenosine
  modified_base 17: mod_base = um
  modified_base 18: mod_base = gm
  modified_base 19: mod_base = gm
  modified_base 20: mod_base = OTHER; note = 2'-O-methyladenosine
  modified_base 21: mod_base = OTHER; note = 2'-O-methyladenosine
  source 1..21: mol_type = other RNA
aggcaatgaacangaatggaa

SEQ ID NO: 741 - RNA, 21 nt, synthetic construct
  modified_base 1: mod_base = gm
  modified_base 1^2: mod_base = OTHER; note = phosphorothioate linkage
  modified_base 2: mod_base = gm
  modified_base 3: mod_base = gm
  modified_base 4: mod_base = cm
  modified_base 5: mod_base = OTHER; note = 2'-O-methyladenosine
  modified_base 6: mod_base = OTHER; note = 2'-O-methyladenosine
  modified_base 7: mod_base = OTHER; note = 2'-fluorouridine
  modified_base 8: mod_base = gm
  modified_base 9: mod_base = OTHER; note = 2'-fluoroadenosine
  modified_base 10: mod_base = OTHER; note = 2'-O-methyladenosine
  modified_base 11: mod_base = OTHER; note = 2'-fluorocytidine
  modified_base 12: mod_base = OTHER; note = 2'-O-methyladenosine
  modified_base 13: mod_base = gm
  modified_base 14: mod_base = gm
  modified_base 15: mod_base = OTHER; note = 2'-O-methyladenosine
  modified_base 16: mod_base = OTHER; note = 2'-O-methyladenosine
  modified_base 17: mod_base = um
  modified_base 18: mod_base = OTHER; note = 2 -O-methylinosine
  modified_base 19: mod_base = gm
  modified_base 20: mod_base = OTHER; note = 2'-O-methyladenosine
  modified_base 21: mod_base = OTHER; note = 2'-O-methyladenosine
  source 1..21: mol_type = other RNA
gggcaatgaacaggaatngaa

SEQ ID NO: 742 - RNA, 21 nt, synthetic construct
  modified_base 1: mod_base = cm
  modified_base 1^2: mod_base = OTHER; note = phosphorothioate linkage
  modified_base 2: mod_base = OTHER; note = 2'-O-methyladenosine
  modified_base 3: mod_base = gm
  modified_base 4: mod_base = um
  modified_base 5: mod_base = OTHER; note = 2'-O-methyladenosine
  modified_base 6: mod_base = gm
  modified_base 7: mod_base = OTHER; note = 2'-fluoroguanosine
  modified_base 8: mod_base = um
  modified_base 9: mod_base = OTHER; note = 2'-fluoroguanosine
  modified_base 10: mod_base = cm
  modified_base 11: mod_base = OTHER; note = 2'-fluorouridine
  modified_base 12: mod_base = cm
  modified_base 13: mod_base = OTHER; note = 2'-O-methyladenosine
  modified_base 14: mod_base = OTHER; note = 2'-O-methyladenosine
  modified_base 15: mod_base = OTHER; note = 2'-O-methyladenosine
  modified_base 16: mod_base = OTHER; note = 2'-O-methyladenosine
  modified_base 17: mod_base = cm
  modified_base 18: mod_base = OTHER; note = 2'-O-methyladenosine
  modified_base 19: mod_base = um
  modified_base 20: mod_base = cm
  modified_base 21: mod_base = OTHER; note = 2'-O-methyladenosine
  source 1..21: mol_type = other RNA
cagtaggtgctcaaaacatca

SEQ ID NO: 743 - RNA, 21 nt, synthetic construct
  modified_base 1: mod_base = um
  modified_base 1^2: mod_base = OTHER; note = phosphorothioate linkage
  modified_base 2: mod_base = OTHER; note = 2-aminoadenine
  modified_base 3: mod_base = gm
  modified_base 4: mod_base = um
  modified_base 5: mod_base = OTHER; note = 2'-O-methyladenosine
  modified_base 6: mod_base = gm
  modified_base 7: mod_base = OTHER; note = 2'-fluoroguanosine
  modified_base 8: mod_base = um
  modified_base 9: mod_base = OTHER; note = 2'-fluoroguanosine
  modified_base 10: mod_base = cm
  modified_base 11: mod_base = OTHER; note = 2'-fluorouridine
  modified_base 12: mod_base = cm
  modified_base 13: mod_base = OTHER; note = 2'-O-methyladenosine
  modified_base 14: mod_base = OTHER; note = 2'-O-methyladenosine
  modified_base 15: mod_base = OTHER; note = 2'-O-methyladenosine
  modified_base 16: mod_base = OTHER; note = 2'-O-methyladenosine
  modified_base 17: mod_base = cm
  modified_base 18: mod_base = OTHER; note = 2'-O-methyladenosine
  modified_base 19: mod_base = um
  modified_base 20: mod_base = cm
  modified_base 21: mod_base = OTHER; note = 2'-O-methyladenosine
  source 1..21: mol_type = other RNA
tagtaggtgctcaaaacatca

SEQ ID NO: 744 - RNA, 21 nt, synthetic construct
  modified_base 1: mod_base = gm
  modified_base 1^2: mod_base = OTHER; note = phosphorothioate linkage
  modified_base 2: mod_base = OTHER; note = 2'-O-methyladenosine
  modified_base 3: mod_base = gm
  modified_base 4: mod_base = um
  modified_base 5: mod_base = OTHER; note = 2'-O-methyladenosine
  modified_base 6: mod_base = gm
  modified_base 7: mod_base = gm
  modified_base 8: mod_base = um
  modified_base 9: mod_base = OTHER; note = 2'-fluoroguanosine
  modified_base 10: mod_base = cm
  modified_base 11: mod_base = OTHER; note = 2'-fluorouridine
  modified_base 12: mod_base = OTHER; note = 2'-fluorocytidine
  modified_base 13: mod_base = OTHER; note = 2'-O-methyladenosine
  modified_base 14: mod_base = OTHER; note = 2'-O-methyladenosine
  modified_base 15: mod_base = OTHER; note = 2'-O-methyladenosine
  modified_base 16: mod_base = OTHER; note = 2'-O-methyladenosine
  modified_base 17: mod_base = cm
  modified_base 18: mod_base = OTHER; note = 2'-O-methyladenosine
  modified_base 19: mod_base = um
  modified_base 20: mod_base = cm
  modified_base 21: mod_base = OTHER; note = 2'-O-methyladenosine
  source 1..21: mol_type = other RNA
gagtaggtgctcaaaacatca

SEQ ID NO: 745 - RNA, 21 nt, synthetic construct
  modified_base 1: mod_base = OTHER; note = 2'-O-methyladenosine
  modified_base 1^2: mod_base = OTHER; note = phosphorothioate linkage
  modified_base 2: mod_base = gm
  modified_base 3: mod_base = gm
  modified_base 4: mod_base = cm
  modified_base 5: mod_base = OTHER; note = 2'-O-methyladenosine
  modified_base 6: mod_base = OTHER; note = 2'-O-methyladenosine
  modified_base 7: mod_base = um
  modified_base 8: mod_base = gm
  modified_base 9: mod_base = OTHER; note = 2'-fluoroadenosine
  modified_base 10: mod_base = OTHER; note = 2'-fluoroadenosine
  modified_base 11: mod_base = OTHER; note = 2'-fluorocytidine
  modified_base 12: mod_base = OTHER; note = 2'-O-methyladenosine
  modified_base 13: mod_base = gm
  modified_base 14: mod_base = gm
  modified_base 15: mod_base = OTHER; note = 2'-O-methyladenosine
  modified_base 16: mod_base = OTHER; note = 2'-O-methyladenosine
  modified_base 17: mod_base = um
  modified_base 18: mod_base = gm
  modified_base 19: mod_base = gm
  modified_base 20: mod_base = OTHER; note = 2'-O-methyladenosine
  modified_base 21: mod_base = OTHER; note = 2'-O-methyladenosine
  source 1..21: mol_type = other RNA
aggcaatgaacaggaatggaa

SEQ ID NO: 746 - RNA, 21 nt, synthetic construct
  modified_base 1: mod_base = gm
  modified_base 1^2: mod_base = OTHER; note = phosphorothioate linkage
  modified_base 2: mod_base = OTHER; note = 2'-O-methyladenosine
  modified_base 3: mod_base = gm
  modified_base 4: mod_base = um
  modified_base 5: mod_base = OTHER; note = 2'-O-methyladenosine
  modified_base 6: mod_base = gm
  modified_base 7: mod_base = OTHER; note = 2'-fluoroguanosine
  modified_base 8: mod_base = um
  modified_base 9: mod_base = OTHER; note = 2'-fluoroguanosine
  modified_base 10: mod_base = cm
  modified_base 11: mod_base = OTHER; note = 2'-fluorouridine
  modified_base 12: mod_base = cm
  modified_base 13: mod_base = OTHER; note = 2'-O-methyladenosine
  modified_base 14: mod_base = OTHER; note = 2'-O-methyladenosine
  modified_base 15: mod_base = OTHER; note = 2'-O-methyladenosine
  modified_base 16: mod_base = OTHER; note = 2'-O-methyladenosine
  modified_base 17: mod_base = cm
  modified_base 18: mod_base = OTHER; note = 2'-O-methyladenosine
  modified_base 19: mod_base = um
  modified_base 20: mod_base = cm
  modified_base 21: mod_base = OTHER; note = 2'-O-methyladenosine
  source 1..21: mol_type = other RNA
gagtaggtgctcaaaacatca

SEQ ID NO: 747 - RNA, 21 nt, synthetic construct
  modified_base 1: mod_base = OTHER; note = 2'-O-methyladenosine
  modified_base 1^2: mod_base = OTHER; note = phosphorothioate linkage
  modified_base 2: mod_base = gm
  modified_base 3: mod_base = gm
  modified_base 4: mod_base = cm
  modified_base 5: mod_base = OTHER; note = 2'-O-methyladenosine
  modified_base 6: mod_base = OTHER; note = 2'-O-methyladenosine
  modified_base 7: mod_base = um
  modified_base 8: mod_base = gm
  modified_base 9: mod_base = OTHER; note = 2'-fluoroadenosine
  modified_base 10: mod_base = OTHER; note = 2'-fluoroadenosine
  modified_base 11: mod_base = OTHER; note = 2'-fluorocytidine
  modified_base 12: mod_base = OTHER; note = 2'-O-methyladenosine
  modified_base 13: mod_base = gm
  modified_base 14: mod_base = gm
  modified_base 15: mod_base = OTHER; note = 2'-O-methyladenosine
  modified_base 16: mod_base = OTHER; note = 2'-O-methyladenosine
  modified_base 17: mod_base = um
  modified_base 18: mod_base = OTHER; note = 2 -O-methylinosine
  modified_base 19: mod_base = gm
  modified_base 20: mod_base = OTHER; note = 2'-O-methyladenosine
  modified_base 21: mod_base = OTHER; note = 2'-O-methyladenosine
  source 1..21: mol_type = other RNA
aggcaatgaacaggaatngaa

SEQ ID NO: 748 - RNA, 21 nt, synthetic construct
  modified_base 1: mod_base = cm
  modified_base 1^2: mod_base = OTHER; note = phosphorothioate linkage
  modified_base 2: mod_base = gm
  modified_base 3: mod_base = gm
  modified_base 4: mod_base = OTHER; note = 2'-O-methyladenosine
  modified_base 5: mod_base = OTHER; note = 2'-O-methyladenosine
  modified_base 6: mod_base = um
  modified_base 7: mod_base = gm
  modified_base 8: mod_base = gm
  modified_base 9: mod_base = OTHER; note = 2'-fluoroadenosine
  modified_base 10: mod_base = OTHER; note = 2'-fluoroadenosine
  modified_base 11: mod_base = OTHER; note = 2'-fluoroadenosine
  modified_base 12: mod_base = cm
  modified_base 13: mod_base = um
  modified_base 14: mod_base = gm
  modified_base 15: mod_base = OTHER; note = 2'-O-methyladenosine
  modified_base 16: mod_base = OTHER; note = 2'-O-methyladenosine
  modified_base 17: mod_base = cm
  modified_base 18: mod_base = OTHER; note = 2'-O-methyladenosine
  modified_base 19: mod_base = cm
  modified_base 20: mod_base = OTHER; note = 2'-O-methyladenosine
  modified_base 21: mod_base = OTHER; note = 2'-O-methyladenosine
  source 1..21: mol_type = other RNA
cggaatggaaactgaacacaa

SEQ ID NO: 749 - RNA, 21 nt, synthetic construct
  modified_base 1: mod_base = cm
  modified_base 1^2: mod_base = OTHER; note = phosphorothioate linkage
  modified_base 2: mod_base = gm
  modified_base 3: mod_base = gm
  modified_base 4: mod_base = OTHER; note = 2'-O-methyladenosine
  modified_base 5: mod_base = OTHER; note = 2'-O-methyladenosine
  modified_base 6: mod_base = um
  modified_base 7: mod_base = gm
  modified_base 8: mod_base = gm
  modified_base 9: mod_base = OTHER; note = 2'-fluoroadenosine
  modified_base 10: mod_base = OTHER; note = 2'-O-methyladenosine
  modified_base 11: mod_base = OTHER; note = 2'-fluoroadenosine
  modified_base 12: mod_base = cm
  modified_base 13: mod_base = OTHER; note = 2'-fluorouridine
  modified_base 14: mod_base = gm
  modified_base 15: mod_base = OTHER; note = 2'-O-methyladenosine
  modified_base 16: mod_base = OTHER; note = 2'-O-methyladenosine
  modified_base 17: mod_base = cm
  modified_base 18: mod_base = OTHER; note = 2'-O-methyladenosine
  modified_base 19: mod_base = cm
  modified_base 20: mod_base = OTHER; note = 2'-O-methyladenosine
  modified_base 21: mod_base = OTHER; note = 2'-O-methyladenosine
  source 1..21: mol_type = other RNA
cggaatggaaactgaacacaa

SEQ ID NO: 750 - RNA, 21 nt, synthetic construct
  modified_base 1: mod_base = cm
  modified_base 1^2: mod_base = OTHER; note = phosphorothioate linkage
  modified_base 2: mod_base = cm
  modified_base 3: mod_base = um
  modified_base 4: mod_base = gm
  modified_base 5: mod_base = gm
  modified_base 6: mod_base = gm
  modified_base 7: mod_base = OTHER; note = 2'-O-methyladenosine
  modified_base 8: mod_base = OTHER; note = 2'-O-methyladenosine
  modified_base 9: mod_base = OTHER; note = 2'-fluoroguanosine
  modified_base 10: mod_base = OTHER; note = 2'-fluorocytidine
  modified_base 11: mod_base = OTHER; note = 2'-fluorocytidine
  modified_base 12: mod_base = OTHER; note = 2'-O-methyladenosine
  modified_base 13: mod_base = gm
  modified_base 14: mod_base = OTHER; note = 2'-O-methyladenosine
  modified_base 15: mod_base = OTHER; note = 2'-O-methyladenosine
  modified_base 16: mod_base = OTHER; note = 2'-O-methyladenosine
  modified_base 17: mod_base = um
  modified_base 18: mod_base = um
  modified_base 19: mod_base = gm
  modified_base 20: mod_base = um
  modified_base 21: mod_base = OTHER; note = 2'-O-methyladenosine
  source 1..21: mol_type = other RNA
cctgggaagccagaaattgta

SEQ ID NO: 751 - RNA, 21 nt, synthetic construct
  modified_base 1: mod_base = cm
  modified_base 1^2: mod_base = OTHER; note = phosphorothioate linkage
  modified_base 2: mod_base = gm
  modified_base 3: mod_base = gm
  modified_base 4: mod_base = OTHER; note = 2'-O-methyladenosine
  modified_base 5: mod_base = OTHER; note = 2'-O-methyladenosine
  modified_base 6: mod_base = um
  modified_base 7: mod_base = gm
  modified_base 8: mod_base = gm
  modified_base 9: mod_base = OTHER; note = 2'-fluoroadenosine
  modified_base 10: mod_base = OTHER; note = 2'-fluoroadenosine
  modified_base 11: mod_base = OTHER; note = 2'-fluoroadenosine
  modified_base 12: mod_base = cm
  modified_base 13: mod_base = um
  modified_base 14: mod_base = gm
  modified_base 15: mod_base = OTHER; note = 2'-O-methyladenosine
  modified_base 16: mod_base = OTHER; note = 2'-O-methyladenosine
  modified_base 17: mod_base = cm
  modified_base 18: mod_base = OTHER; note = 2'-O-methyladenosine
  modified_base 19: mod_base = cm
  modified_base 20: mod_base = OTHER; note = 2'-O-methyladenosine
  modified_base 21: mod_base = OTHER; note = 2'-O-methyladenosine
  source 1..21: mol_type = other RNA
cggaatggaaactgaacacaa

SEQ ID NO: 752 - RNA, 21 nt, synthetic construct
  modified_base 1: mod_base = cm
  modified_base 1^2: mod_base = OTHER; note = phosphorothioate linkage
  modified_base 2: mod_base = gm
  modified_base 3: mod_base = gm
  modified_base 4: mod_base = OTHER; note = 2'-O-methyladenosine
  modified_base 5: mod_base = OTHER; note = 2'-O-methyladenosine
  modified_base 6: mod_base = um
  modified_base 7: mod_base = gm
  modified_base 8: mod_base = gm
  modified_base 9: mod_base = OTHER; note = 2'-fluoroadenosine
  modified_base 10: mod_base = OTHER; note = 2'-fluoroadenosine
  modified_base 11: mod_base = OTHER; note = 2'-fluoroadenosine
  modified_base 12: mod_base = cm
  modified_base 13: mod_base = um
  modified_base 14: mod_base = gm
  modified_base 15: mod_base = OTHER; note = 2'-O-methyladenosine
  modified_base 16: mod_base = OTHER; note = 2'-O-methyladenosine
  modified_base 17: mod_base = cm
  modified_base 18: mod_base = OTHER; note = 2'-O-methyladenosine
  modified_base 19: mod_base = cm
  modified_base 20: mod_base = OTHER; note = 2'-O-methyladenosine
  modified_base 21: mod_base = OTHER; note = 2'-O-methyladenosine
  source 1..21: mol_type = other RNA
cggaatggaaactgaacacaa

SEQ ID NO: 753 - RNA, 21 nt, synthetic construct
  modified_base 1: mod_base = cm
  modified_base 2: mod_base = gm
  modified_base 3: mod_base = gm
  modified_base 4: mod_base = OTHER; note = 2'-O-methyladenosine
  modified_base 5: mod_base = OTHER; note = 2'-O-methyladenosine
  modified_base 6: mod_base = um
  modified_base 7: mod_base = gm
  modified_base 8: mod_base = gm
  modified_base 9: mod_base = OTHER; note = 2'-fluoroadenosine
  modified_base 10: mod_base = OTHER; note = 2'-fluoroadenosine
  modified_base 11: mod_base = OTHER; note = 2'-fluoroadenosine
  modified_base 12: mod_base = cm
  modified_base 13: mod_base = um
  modified_base 14: mod_base = gm
  modified_base 15: mod_base = OTHER; note = 2'-O-methyladenosine
  modified_base 16: mod_base = OTHER; note = 2'-O-methyladenosine
  modified_base 17: mod_base = cm
  modified_base 18: mod_base = OTHER; note = 2'-O-methyladenosine
  modified_base 19: mod_base = cm
  modified_base 20: mod_base = OTHER; note = 2'-O-methyladenosine
  modified_base 21: mod_base = OTHER; note = 2'-O-methyladenosine
  source 1..21: mol_type = other RNA
cggaatggaaactgaacacaa

SEQ ID NO: 754 - RNA, 21 nt, synthetic construct
  modified_base 1: mod_base = cm
  modified_base 1^2: mod_base = OTHER; note = phosphorothioate linkage
  modified_base 2: mod_base = gm
  modified_base 3: mod_base = gm
  modified_base 4: mod_base = OTHER; note = 2'-O-methyladenosine
  modified_base 5: mod_base = OTHER; note = 2'-O-methyladenosine
  modified_base 6: mod_base = um
  modified_base 7: mod_base = gm
  modified_base 8: mod_base = gm
  modified_base 9: mod_base = OTHER; note = 2'-fluoroadenosine
  modified_base 10: mod_base = OTHER; note = 2'-fluoroadenosine
  modified_base 11: mod_base = OTHER; note = 2'-fluoroadenosine
  modified_base 12: mod_base = cm
  modified_base 13: mod_base = um
  modified_base 14: mod_base = gm
  modified_base 15: mod_base = OTHER; note = 2'-O-methyladenosine
  modified_base 16: mod_base = OTHER; note = 2'-O-methyladenosine
  modified_base 17: mod_base = cm
  modified_base 18: mod_base = OTHER; note = 2'-O-methyladenosine
  modified_base 19: mod_base = cm
  modified_base 20: mod_base = OTHER; note = 2'-O-methyladenosine
  modified_base 21: mod_base = OTHER; note = 2'-O-methyladenosine
  source 1..21: mol_type = other RNA
cggaatggaaactgaacacaa

SEQ ID NO: 755 - RNA, 21 nt, synthetic construct
  modified_base 1: mod_base = cm
  modified_base 2: mod_base = gm
  modified_base 3: mod_base = gm
  modified_base 4: mod_base = OTHER; note = 2'-O-methyladenosine
  modified_base 5: mod_base = OTHER; note = 2'-O-methyladenosine
  modified_base 6: mod_base = um
  modified_base 7: mod_base = gm
  modified_base 8: mod_base = gm
  modified_base 9: mod_base = OTHER; note = 2'-fluoroadenosine
  modified_base 10: mod_base = OTHER; note = 2'-fluoroadenosine
  modified_base 11: mod_base = OTHER; note = 2'-fluoroadenosine
  modified_base 12: mod_base = cm
  modified_base 13: mod_base = um
  modified_base 14: mod_base = gm
  modified_base 15: mod_base = OTHER; note = 2'-O-methyladenosine
  modified_base 16: mod_base = OTHER; note = 2'-O-methyladenosine
  modified_base 17: mod_base = cm
  modified_base 18: mod_base = OTHER; note = 2'-O-methyladenosine
  modified_base 19: mod_base = cm
  modified_base 20: mod_base = OTHER; note = 2'-O-methyladenosine
  modified_base 21: mod_base = OTHER; note = 2'-O-methyladenosine
  source 1..21: mol_type = other RNA
cggaatggaaactgaacacaa

SEQ ID NO: 756 - RNA, 21 nt, synthetic construct
  modified_base 1: mod_base = cm
  modified_base 1^2: mod_base = OTHER; note = phosphorothioate linkage
  modified_base 2: mod_base = gm
  modified_base 3: mod_base = gm
  modified_base 4: mod_base = OTHER; note = 2'-O-methyladenosine
  modified_base 5: mod_base = OTHER; note = 2'-O-methyladenosine
  modified_base 6: mod_base = um
  modified_base 7: mod_base = OTHER; note = 2'-fluoroguanosine
  modified_base 8: mod_base = gm
  modified_base 9: mod_base = OTHER; note = 2'-fluoroadenosine
  modified_base 10: mod_base = OTHER; note = 2'-O-methyladenosine
  modified_base 11: mod_base = OTHER; note = 2'-fluoroadenosine
  modified_base 12: mod_base = cm
  modified_base 13: mod_base = um
  modified_base 14: mod_base = gm
  modified_base 15: mod_base = OTHER; note = 2'-O-methyladenosine
  modified_base 16: mod_base = OTHER; note = 2'-O-methyladenosine
  modified_base 17: mod_base = um
  modified_base 18: mod_base = OTHER; note = 2'-O-methyladenosine
  modified_base 19: mod_base = cm
  modified_base 20: mod_base = OTHER; note = 2'-O-methyladenosine
  modified_base 21: mod_base = OTHER; note = 2'-O-methyladenosine
  source 1..21: mol_type = other RNA
cggaatggaaactgaatacaa

SEQ ID NO: 757 - RNA, 21 nt, synthetic construct
  modified_base 1: mod_base = cm
  modified_base 1^2: mod_base = OTHER; note = phosphorothioate linkage
  modified_base 2: mod_base = gm
  modified_base 3: mod_base = gm
  modified_base 4: mod_base = OTHER; note = 2'-O-methyladenosine
  modified_base 5: mod_base = OTHER; note = 2'-O-methyladenosine
  modified_base 6: mod_base = um
  modified_base 7: mod_base = OTHER; note = 2'-fluoroguanosine
  modified_base 8: mod_base = gm
  modified_base 9: mod_base = OTHER; note = 2'-fluoroadenosine
  modified_base 10: mod_base = OTHER; note = 2'-O-methyladenosine
  modified_base 11: mod_base = OTHER; note = 2'-fluoroadenosine
  modified_base 12: mod_base = cm
  modified_base 13: mod_base = um
  modified_base 14: mod_base = gm
  modified_base 15: mod_base = OTHER; note = 2'-O-methyladenosine
  modified_base 16: mod_base = OTHER; note = 2'-O-methyladenosine
  modified_base 17: mod_base = cm
  modified_base 18: mod_base = OTHER; note = 2'-O-methyladenosine
  modified_base 19: mod_base = cm
  modified_base 20: mod_base = OTHER; note = 2'-O-methyladenosine
  modified_base 21: mod_base = OTHER; note = 2'-O-methyladenosine
  source 1..21: mol_type = other RNA
cggaatggaaactgaacacaa

SEQ ID NO: 758 - RNA, 21 nt, synthetic construct
  modified_base 1: mod_base = gm
  modified_base 1^2: mod_base = OTHER; note = phosphorothioate linkage
  modified_base 2: mod_base = gm
  modified_base 3: mod_base = gm
  modified_base 4: mod_base = OTHER; note = 2'-O-methyladenosine
  modified_base 5: mod_base = OTHER; note = 2'-O-methyladenosine
  modified_base 6: mod_base = um
  modified_base 7: mod_base = OTHER; note = 2'-fluoroguanosine
  modified_base 8: mod_base = gm
  modified_base 9: mod_base = OTHER; note = 2'-fluoroadenosine
  modified_base 10: mod_base = OTHER; note = 2'-O-methyladenosine
  modified_base 11: mod_base = OTHER; note = 2'-fluoroadenosine
  modified_base 12: mod_base = cm
  modified_base 13: mod_base = um
  modified_base 14: mod_base = gm
  modified_base 15: mod_base = OTHER; note = 2'-O-methyladenosine
  modified_base 16: mod_base = OTHER; note = 2'-O-methyladenosine
  modified_base 17: mod_base = cm
  modified_base 18: mod_base = OTHER; note = 2'-O-methyladenosine
  modified_base 19: mod_base = cm
  modified_base 20: mod_base = OTHER; note = 2'-O-methyladenosine
  modified_base 21: mod_base = OTHER; note = 2'-O-methyladenosine
  source 1..21: mol_type = other RNA
gggaatggaaactgaacacaa

SEQ ID NO: 759 - RNA, 21 nt, synthetic construct
  modified_base 1: mod_base = um
  modified_base 1^2: mod_base = OTHER; note = phosphorothioate linkage
  modified_base 2: mod_base = gm
  modified_base 3: mod_base = gm
  modified_base 4: mod_base = OTHER; note = 2'-O-methyladenosine
  modified_base 5: mod_base = OTHER; note = 2'-O-methyladenosine
  modified_base 6: mod_base = um
  modified_base 7: mod_base = OTHER; note = 2'-fluoroguanosine
  modified_base 8: mod_base = gm
  modified_base 9: mod_base = OTHER; note = 2'-fluoroadenosine
  modified_base 10: mod_base = OTHER; note = 2'-O-methyladenosine
  modified_base 11: mod_base = OTHER; note = 2'-fluoroadenosine
  modified_base 12: mod_base = cm
  modified_base 13: mod_base = um
  modified_base 14: mod_base = gm
  modified_base 15: mod_base = OTHER; note = 2'-O-methyladenosine
  modified_base 16: mod_base = OTHER; note = 2'-O-methyladenosine
  modified_base 17: mod_base = cm
  modified_base 18: mod_base = OTHER; note = 2'-O-methyladenosine
  modified_base 19: mod_base = cm
  modified_base 20: mod_base = OTHER; note = 2'-O-methyladenosine
  modified_base 21: mod_base = OTHER; note = 2'-O-methyladenosine
  source 1..21: mol_type = other RNA
tggaatggaaactgaacacaa

SEQ ID NO: 760 - RNA, 21 nt, synthetic construct
  modified_base 1: mod_base = cm
  modified_base 1^2: mod_base = OTHER; note = phosphorothioate linkage
  modified_base 2: mod_base = gm
  modified_base 3: mod_base = gm
  modified_base 4: mod_base = OTHER; note = 2'-O-methyladenosine
  modified_base 5: mod_base = OTHER; note = 2'-O-methyladenosine
  modified_base 6: mod_base = um
  modified_base 7: mod_base = OTHER; note = 2'-fluoroguanosine
  modified_base 8: mod_base = gm
  modified_base 9: mod_base = OTHER; note = 2'-fluoroadenosine
  modified_base 10: mod_base = OTHER; note = 2-aminoadenine
  modified_base 11: mod_base = OTHER; note = 2'-fluoroadenosine
  modified_base 12: mod_base = cm
  modified_base 13: mod_base = um
  modified_base 14: mod_base = gm
  modified_base 15: mod_base = OTHER; note = 2'-O-methyladenosine
  modified_base 16: mod_base = OTHER; note = 2'-O-methyladenosine
  modified_base 17: mod_base = cm
  modified_base 18: mod_base = OTHER; note = 2'-O-methyladenosine
  modified_base 19: mod_base = cm
  modified_base 20: mod_base = OTHER; note = 2'-O-methyladenosine
  modified_base 21: mod_base = OTHER; note = 2'-O-methyladenosine
  source 1..21: mol_type = other RNA
cggaatggaaactgaacacaa

SEQ ID NO: 761 - RNA, 21 nt, synthetic construct
  modified_base 1: mod_base = cm
  modified_base 1^2: mod_base = OTHER; note = phosphorothioate linkage
  modified_base 2: mod_base = gm
  modified_base 3: mod_base = gm
  modified_base 4: mod_base = OTHER; note = 2'-O-methyladenosine
  modified_base 5: mod_base = OTHER; note = 2'-O-methyladenosine
  modified_base 6: mod_base = um
  modified_base 7: mod_base = gm
  modified_base 8: mod_base = gm
  modified_base 9: mod_base = OTHER; note = 2'-fluoroadenosine
  modified_base 10: mod_base = OTHER; note = 2'-fluoroadenosine
  modified_base 11: mod_base = OTHER; note = 2'-fluoroadenosine
  modified_base 12: mod_base = cm
  modified_base 13: mod_base = um
  modified_base 14: mod_base = gm
  modified_base 15: mod_base = OTHER; note = 2'-O-methyladenosine
  modified_base 16: mod_base = OTHER; note = 2'-O-methyladenosine
  modified_base 17: mod_base = um
  modified_base 18: mod_base = OTHER; note = 2'-O-methyladenosine
  modified_base 19: mod_base = cm
  modified_base 20: mod_base = OTHER; note = 2'-O-methyladenosine
  modified_base 21: mod_base = OTHER; note = 2'-O-methyladenosine
  source 1..21: mol_type = other RNA
cggaatggaaactgaatacaa

SEQ ID NO: 762 - RNA, 21 nt, synthetic construct
  modified_base 1: mod_base = cm
  modified_base 1^2: mod_base = OTHER; note = phosphorothioate linkage
  modified_base 2: mod_base = gm
  modified_base 3: mod_base = gm
  modified_base 4: mod_base = OTHER; note = 2'-O-methyladenosine
  modified_base 5: mod_base = OTHER; note = 2'-O-methyladenosine
  modified_base 6: mod_base = um
  modified_base 7: mod_base = gm
  modified_base 8: mod_base = gm
  modified_base 9: mod_base = OTHER; note = 2'-fluoroadenosine
  modified_base 10: mod_base = OTHER; note = 2'-fluoroadenosine
  modified_base 11: mod_base = OTHER; note = 2'-fluoroadenosine
  modified_base 12: mod_base = cm
  modified_base 13: mod_base = um
  modified_base 14: mod_base = gm
  modified_base 15: mod_base = OTHER; note = 2'-O-methyladenosine
  modified_base 16: mod_base = OTHER; note = 2'-O-methyladenosine
  modified_base 17: mod_base = cm
  modified_base 18: mod_base = OTHER; note = 2'-O-methyladenosine
  modified_base 19: mod_base = cm
  modified_base 20: mod_base = OTHER; note = 2'-O-methyladenosine
  modified_base 21: mod_base = OTHER; note = 2'-O-methyladenosine
  source 1..21: mol_type = other RNA
cggaatggaaactgaacacaa

SEQ ID NO: 763 - RNA, 21 nt, synthetic construct
  modified_base 1: mod_base = cm
  modified_base 2: mod_base = gm
  modified_base 3: mod_base = gm
  modified_base 4: mod_base = OTHER; note = 2'-O-methyladenosine
  modified_base 5: mod_base = OTHER; note = 2'-O-methyladenosine
  modified_base 6: mod_base = um
  modified_base 7: mod_base = gm
  modified_base 8: mod_base = gm
  modified_base 9: mod_base = OTHER; note = 2'-fluoroadenosine
  modified_base 10: mod_base = OTHER; note = 2'-fluoroadenosine
  modified_base 11: mod_base = OTHER; note = 2'-fluoroadenosine
  modified_base 12: mod_base = cm
  modified_base 13: mod_base = um
  modified_base 14: mod_base = gm
  modified_base 15: mod_base = OTHER; note = 2'-O-methyladenosine
  modified_base 16: mod_base = OTHER; note = 2'-O-methyladenosine
  modified_base 17: mod_base = cm
  modified_base 18: mod_base = OTHER; note = 2'-O-methyladenosine
  modified_base 19: mod_base = cm
  modified_base 20: mod_base = OTHER; note = 2'-O-methyladenosine
  modified_base 21: mod_base = OTHER; note = 2'-O-methyladenosine
  source 1..21: mol_type = other RNA
cggaatggaaactgaacacaa

SEQ ID NO: 764 - RNA, 21 nt, synthetic construct
  modified_base 1: mod_base = cm
  modified_base 1^2: mod_base = OTHER; note = phosphorothioate linkage
  modified_base 2: mod_base = gm
  modified_base 3: mod_base = gm
  modified_base 4: mod_base = OTHER; note = 2'-O-methyladenosine
  modified_base 5: mod_base = OTHER; note = 2'-O-methyladenosine
  modified_base 6: mod_base = um
  modified_base 7: mod_base = gm
  modified_base 8: mod_base = gm
  modified_base 9: mod_base = OTHER; note = 2'-fluoroadenosine
  modified_base 10: mod_base = OTHER; note = 2'-fluoroadenosine
  modified_base 11: mod_base = OTHER; note = 2'-fluoroadenosine
  modified_base 12: mod_base = cm
  modified_base 13: mod_base = um
  modified_base 14: mod_base = gm
  modified_base 15: mod_base = OTHER; note = 2'-O-methyladenosine
  modified_base 16: mod_base = OTHER; note = 2'-O-methyladenosine
  modified_base 17: mod_base = cm
  modified_base 18: mod_base = OTHER; note = 2'-O-methyladenosine
  modified_base 19: mod_base = cm
  modified_base 20: mod_base = OTHER; note = 2'-O-methyladenosine
  modified_base 21: mod_base = OTHER; note = 2'-O-methyladenosine
  source 1..21: mol_type = other RNA
cggaatggaaactgaacacaa

SEQ ID NO: 765 - RNA, 21 nt, synthetic construct
  modified_base 1: mod_base = cm
  modified_base 2: mod_base = gm
  modified_base 3: mod_base = gm
  modified_base 4: mod_base = OTHER; note = 2'-O-methyladenosine
  modified_base 5: mod_base = OTHER; note = 2'-O-methyladenosine
  modified_base 6: mod_base = um
  modified_base 7: mod_base = gm
  modified_base 8: mod_base = gm
  modified_base 9: mod_base = OTHER; note = 2'-fluoroadenosine
  modified_base 10: mod_base = OTHER; note = 2'-fluoroadenosine
  modified_base 11: mod_base = OTHER; note = 2'-fluoroadenosine
  modified_base 12: mod_base = cm
  modified_base 13: mod_base = um
  modified_base 14: mod_base = gm
  modified_base 15: mod_base = OTHER; note = 2'-O-methyladenosine
  modified_base 16: mod_base = OTHER; note = 2'-O-methyladenosine
  modified_base 17: mod_base = cm
  modified_base 18: mod_base = OTHER; note = 2'-O-methyladenosine
  modified_base 19: mod_base = cm
  modified_base 20: mod_base = OTHER; note = 2'-O-methyladenosine
  modified_base 21: mod_base = OTHER; note = 2'-O-methyladenosine
  source 1..21: mol_type = other RNA
cggaatggaaactgaacacaa

SEQ ID NO: 766 - RNA, 21 nt, synthetic construct
  modified_base 1: mod_base = cm
  modified_base 1^2: mod_base = OTHER; note = phosphorothioate linkage
  modified_base 2: mod_base = gm
  modified_base 3: mod_base = gm
  modified_base 4: mod_base = OTHER; note = 2'-O-methyladenosine
  modified_base 5: mod_base = OTHER; note = 2'-O-methyladenosine
  modified_base 6: mod_base = um
  modified_base 7: mod_base = gm
  modified_base 8: mod_base = gm
  modified_base 9: mod_base = OTHER; note = 2'-fluoroadenosine
  modified_base 10: mod_base = OTHER; note = 2'-fluoroadenosine
  modified_base 11: mod_base = OTHER; note = 2'-fluoroadenosine
  modified_base 12: mod_base = cm
  modified_base 13: mod_base = um
  modified_base 14: mod_base = gm
  modified_base 15: mod_base = OTHER; note = 2'-O-methyladenosine
  modified_base 16: mod_base = OTHER; note = 2'-O-methyladenosine
  modified_base 17: mod_base = cm
  modified_base 18: mod_base = OTHER; note = 2'-O-methyladenosine
  modified_base 19: mod_base = cm
  modified_base 20: mod_base = OTHER; note = 2'-O-methyladenosine
  modified_base 21: mod_base = OTHER; note = 2'-O-methyladenosine
  source 1..21: mol_type = other RNA
cggaatggaaactgaacacaa

SEQ ID NO: 767 - RNA, 21 nt, synthetic construct
  modified_base 1: mod_base = cm
  modified_base 2: mod_base = gm
  modified_base 3: mod_base = gm
  modified_base 4: mod_base = OTHER; note = 2'-O-methyladenosine
  modified_base 5: mod_base = OTHER; note = 2'-O-methyladenosine
  modified_base 6: mod_base = um
  modified_base 7: mod_base = gm
  modified_base 8: mod_base = gm
  modified_base 9: mod_base = OTHER; note = 2'-fluoroadenosine
  modified_base 10: mod_base = OTHER; note = 2'-fluoroadenosine
  modified_base 11: mod_base = OTHER; note = 2'-fluoroadenosine
  modified_base 12: mod_base = cm
  modified_base 13: mod_base = um
  modified_base 14: mod_base = gm
  modified_base 15: mod_base = OTHER; note = 2'-O-methyladenosine
  modified_base 16: mod_base = OTHER; note = 2'-O-methyladenosine
  modified_base 17: mod_base = cm
  modified_base 18: mod_base = OTHER; note = 2'-O-methyladenosine
  modified_base 19: mod_base = cm
  modified_base 20: mod_base = OTHER; note = 2'-O-methyladenosine
  modified_base 21: mod_base = OTHER; note = 2'-O-methyladenosine
  source 1..21: mol_type = other RNA
cggaatggaaactgaacacaa

SEQ ID NO: 768 - RNA, 21 nt, synthetic construct
  modified_base 1: mod_base = gm
  modified_base 1^2: mod_base = OTHER; note = phosphorothioate linkage
  modified_base 2: mod_base = gm
  modified_base 3: mod_base = gm
  modified_base 4: mod_base = OTHER; note = 2'-O-methyladenosine
  modified_base 5: mod_base = OTHER; note = 2'-O-methyladenosine
  modified_base 6: mod_base = um
  modified_base 7: mod_base = gm
  modified_base 8: mod_base = gm
  modified_base 9: mod_base = OTHER; note = 2'-fluoroadenosine
  modified_base 10: mod_base = OTHER; note = 2'-fluoroadenosine
  modified_base 11: mod_base = OTHER; note = 2'-fluoroadenosine
  modified_base 12: mod_base = cm
  modified_base 13: mod_base = um
  modified_base 14: mod_base = gm
  modified_base 15: mod_base = OTHER; note = 2'-O-methyladenosine
  modified_base 16: mod_base = OTHER; note = 2'-O-methyladenosine
  modified_base 17: mod_base = cm
  modified_base 18: mod_base = OTHER; note = 2'-O-methyladenosine
  modified_base 19: mod_base = cm
  modified_base 20: mod_base = OTHER; note = 2'-O-methyladenosine
  modified_base 21: mod_base = OTHER; note = 2'-O-methyladenosine
  source 1..21: mol_type = other RNA
gggaatggaaactgaacacaa

SEQ ID NO: 769 - RNA, 21 nt, synthetic construct
  modified_base 1: mod_base = cm
  modified_base 1^2: mod_base = OTHER; note = phosphorothioate linkage
  modified_base 2: mod_base = gm
  modified_base 3: mod_base = gm
  modified_base 4: mod_base = OTHER; note = 2'-O-methyladenosine
  modified_base 5: mod_base = OTHER; note = 2'-O-methyladenosine
  modified_base 6: mod_base = um
  modified_base 7: mod_base = gm
  modified_base 8: mod_base = gm
  modified_base 9: mod_base = OTHER; note = 2'-fluoroadenosine
  modified_base 10: mod_base = OTHER; note = 2'-fluoroadenosine
  modified_base 11: mod_base = OTHER; note = 2'-fluoroadenosine
  modified_base 12: mod_base = cm
  modified_base 13: mod_base = um
  modified_base 14: mod_base = OTHER; note = 2 -O-methylinosine
  modified_base 15: mod_base = OTHER; note = 2'-O-methyladenosine
  modified_base 16: mod_base = OTHER; note = 2'-O-methyladenosine
  modified_base 17: mod_base = cm
  modified_base 18: mod_base = OTHER; note = 2'-O-methyladenosine
  modified_base 19: mod_base = cm
  modified_base 20: mod_base = OTHER; note = 2'-O-methyladenosine
  modified_base 21: mod_base = OTHER; note = 2'-O-methyladenosine
  source 1..21: mol_type = other RNA
cggaatggaaactnaacacaa

SEQ ID NO: 770 - RNA, 21 nt, synthetic construct
  modified_base 1: mod_base = cm
  modified_base 1^2: mod_base = OTHER; note = phosphorothioate linkage
  modified_base 2: mod_base = gm
  modified_base 3: mod_base = gm
  modified_base 4: mod_base = OTHER; note = 2'-O-methyladenosine
  modified_base 5: mod_base = OTHER; note = 2'-O-methyladenosine
  modified_base 6: mod_base = um
  modified_base 7: mod_base = gm
  modified_base 8: mod_base = gm
  modified_base 9: mod_base = OTHER; note = 2'-fluoroadenosine
  modified_base 10: mod_base = OTHER; note = 2-aminoadenine
  modified_base 11: mod_base = OTHER; note = 2'-fluoroadenosine
  modified_base 12: mod_base = cm
  modified_base 13: mod_base = um
  modified_base 14: mod_base = OTHER; note = 2 -O-methylinosine
  modified_base 15: mod_base = OTHER; note = 2'-O-methyladenosine
  modified_base 16: mod_base = OTHER; note = 2'-O-methyladenosine
  modified_base 17: mod_base = cm
  modified_base 18: mod_base = OTHER; note = 2'-O-methyladenosine
  modified_base 19: mod_base = cm
  modified_base 20: mod_base = OTHER; note = 2'-O-methyladenosine
  modified_base 21: mod_base = OTHER; note = 2'-O-methyladenosine
  source 1..21: mol_type = other RNA
cggaatggaaactnaacacaa

SEQ ID NO: 771 - RNA, 21 nt, synthetic construct
  modified_base 1: mod_base = gm
  modified_base 1^2: mod_base = OTHER; note = phosphorothioate linkage
  modified_base 2: mod_base = gm
  modified_base 3: mod_base = OTHER; note = 2'-O-methyladenosine
  modified_base 4: mod_base = OTHER; note = 2'-O-methyladenosine
  modified_base 5: mod_base = um
  modified_base 6: mod_base = gm
  modified_base 7: mod_base = gm
  modified_base 8: mod_base = OTHER; note = 2'-O-methyladenosine
  modified_base 9: mod_base = OTHER; note = 2'-fluoroadenosine
  modified_base 10: mod_base = OTHER; note = 2'-fluoroadenosine
  modified_base 11: mod_base = OTHER; note = 2'-fluorocytidine
  modified_base 12: mod_base = um
  modified_base 13: mod_base = gm
  modified_base 14: mod_base = OTHER; note = 2'-O-methyladenosine
  modified_base 15: mod_base = OTHER; note = 2'-O-methyladenosine
  modified_base 16: mod_base = cm
  modified_base 17: mod_base = OTHER; note = 2'-O-methyladenosine
  modified_base 18: mod_base = cm
  modified_base 19: mod_base = OTHER; note = 2'-O-methyladenosine
  modified_base 20: mod_base = OTHER; note = 2 -O-methylinosine
  modified_base 21: mod_base = OTHER; note = 2'-O-methyladenosine
  source 1..21: mol_type = other RNA
ggaatggaaactgaacacana

SEQ ID NO: 772 - RNA, 21 nt, synthetic construct
  modified_base 1: mod_base = OTHER; note = 2'-O-methyladenosine
  modified_base 1^2: mod_base = OTHER; note = phosphorothioate linkage
  modified_base 2: mod_base = cm
  modified_base 3: mod_base = cm
  modified_base 4: mod_base = OTHER; note = 2'-O-methyladenosine
  modified_base 5: mod_base = gm
  modified_base 6: mod_base = OTHER; note = 2'-O-methyladenosine
  modified_base 7: mod_base = um
  modified_base 8: mod_base = um
  modified_base 9: mod_base = OTHER; note = 2'-fluorocytidine
  modified_base 10: mod_base = OTHER; note = 2'-fluorocytidine
  modified_base 11: mod_base = OTHER; note = 2'-fluorouridine
  modified_base 12: mod_base = gm
  modified_base 13: mod_base = gm
  modified_base 14: mod_base = gm
  modified_base 15: mod_base = OTHER; note = 2'-O-methyladenosine
  modified_base 16: mod_base = OTHER; note = 2'-O-methyladenosine
  modified_base 17: mod_base = OTHER; note = 2 -O-methylinosine
  modified_base 18: mod_base = cm
  modified_base 19: mod_base = cm
  modified_base 20: mod_base = OTHER; note = 2'-O-methyladenosine
  modified_base 21: mod_base = OTHER; note = 2'-O-methyladenosine
  source 1..21: mol_type = other RNA
accagattcctgggaanccaa

SEQ ID NO: 773 - RNA, 21 nt, synthetic construct
  modified_base 1: mod_base = um
  modified_base 1^2: mod_base = OTHER; note = phosphorothioate linkage
  modified_base 2: mod_base = cm
  modified_base 3: mod_base = cm
  modified_base 4: mod_base = um
  modified_base 5: mod_base = gm
  modified_base 6: mod_base = gm
  modified_base 7: mod_base = gm
  modified_base 8: mod_base = OTHER; note = 2'-O-methyladenosine
  modified_base 9: mod_base = OTHER; note = 2'-fluoroadenosine
  modified_base 10: mod_base = OTHER; note = 2'-fluoroguanosine
  modified_base 11: mod_base = OTHER; note = 2'-fluorocytidine
  modified_base 12: mod_base = cm
  modified_base 13: mod_base = OTHER; note = 2'-O-methyladenosine
  modified_base 14: mod_base = gm
  modified_base 15: mod_base = OTHER; note = 2'-O-methyladenosine
  modified_base 16: mod_base = OTHER; note = 2'-O-methyladenosine
  modified_base 17: mod_base = OTHER; note = 2'-O-methyladenosine
  modified_base 18: mod_base = um
  modified_base 19: mod_base = um
  modified_base 20: mod_base = gm
  modified_base 21: mod_base = um
  source 1..21: mol_type = other RNA
tcctgggaagccagaaattgt

SEQ ID NO: 774 - RNA, 21 nt, synthetic construct
  modified_base 1: mod_base = gm
  modified_base 1^2: mod_base = OTHER; note = phosphorothioate linkage
  modified_base 2: mod_base = OTHER; note = 2'-O-methyladenosine
  modified_base 3: mod_base = gm
  modified_base 4: mod_base = um
  modified_base 5: mod_base = OTHER; note = 2'-O-methyladenosine
  modified_base 6: mod_base = gm
  modified_base 7: mod_base = OTHER; note = 2'-fluoroguanosine
  modified_base 8: mod_base = um
  modified_base 9: mod_base = OTHER; note = 2'-fluoroguanosine
  modified_base 10: mod_base = cm
  modified_base 11: mod_base = OTHER; note = 2'-fluorouridine
  modified_base 12: mod_base = cm
  modified_base 13: mod_base = OTHER; note = 2'-O-methyladenosine
  modified_base 14: mod_base = OTHER; note = 2'-O-methyladenosine
  modified_base 15: mod_base = OTHER; note = 2'-O-methyladenosine
  modified_base 16: mod_base = OTHER; note = 2'-O-methyladenosine
  modified_base 17: mod_base = cm
  modified_base 18: mod_base = OTHER; note = 2'-O-methyladenosine
  modified_base 19: mod_base = um
  modified_base 20: mod_base = cm
  modified_base 21: mod_base = OTHER; note = 2'-O-methyladenosine
  source 1..21: mol_type = other RNA
gagtaggtgctcaaaacatca

SEQ ID NO: 775 - RNA, 21 nt, synthetic construct
  modified_base 1: mod_base = OTHER; note = 2'-O-methyladenosine
  modified_base 1^2: mod_base = OTHER; note = phosphorothioate linkage
  modified_base 2: mod_base = gm
  modified_base 3: mod_base = gm
  modified_base 4: mod_base = cm
  modified_base 5: mod_base = OTHER; note = 2'-O-methyladenosine
  modified_base 6: mod_base = OTHER; note = 2'-O-methyladenosine
  modified_base 7: mod_base = um
  modified_base 8: mod_base = gm
  modified_base 9: mod_base = OTHER; note = 2'-fluoroadenosine
  modified_base 10: mod_base = OTHER; note = 2'-fluoroadenosine
  modified_base 11: mod_base = OTHER; note = 2'-fluorocytidine
  modified_base 12: mod_base = OTHER; note = 2'-O-methyladenosine
  modified_base 13: mod_base = gm
  modified_base 14: mod_base = gm
  modified_base 15: mod_base = OTHER; note = 2'-O-methyladenosine
  modified_base 16: mod_base = OTHER; note = 2'-O-methyladenosine
  modified_base 17: mod_base = um
  modified_base 18: mod_base = OTHER; note = 2 -O-methylinosine
  modified_base 19: mod_base = gm
  modified_base 20: mod_base = OTHER; note = 2'-O-methyladenosine
  modified_base 21: mod_base = OTHER; note = 2'-O-methyladenosine
  source 1..21: mol_type = other RNA
aggcaatgaacaggaatngaa

SEQ ID NO: 776 - RNA, 21 nt, synthetic construct
  modified_base 1: mod_base = cm
  modified_base 1^2: mod_base = OTHER; note = phosphorothioate linkage
  modified_base 2: mod_base = gm
  modified_base 3: mod_base = gm
  modified_base 4: mod_base = OTHER; note = 2'-O-methyladenosine
  modified_base 5: mod_base = OTHER; note = 2'-O-methyladenosine
  modified_base 6: mod_base = um
  modified_base 7: mod_base = gm
  modified_base 8: mod_base = gm
  modified_base 9: mod_base = OTHER; note = 2'-fluoroadenosine
  modified_base 10: mod_base = OTHER; note = 2'-O-methyladenosine
  modified_base 11: mod_base = OTHER; note = 2'-fluoroadenosine
  modified_base 12: mod_base = cm
  modified_base 13: mod_base = OTHER; note = 2'-fluorouridine
  modified_base 14: mod_base = gm
  modified_base 15: mod_base = OTHER; note = 2'-O-methyladenosine
  modified_base 16: mod_base = OTHER; note = 2'-O-methyladenosine
  modified_base 17: mod_base = cm
  modified_base 18: mod_base = OTHER; note = 2'-O-methyladenosine
  modified_base 19: mod_base = cm
  modified_base 20: mod_base = OTHER; note = 2'-O-methyladenosine
  modified_base 21: mod_base = OTHER; note = 2'-O-methyladenosine
  source 1..21: mol_type = other RNA
cggaatggaaactgaacacaa

SEQ ID NO: 777 - RNA, 21 nt, synthetic construct
  modified_base 1: mod_base = gm
  modified_base 1^2: mod_base = OTHER; note = phosphorothioate linkage
  modified_base 2: mod_base = OTHER; note = 2'-O-methyladenosine
  modified_base 3: mod_base = gm
  modified_base 4: mod_base = um
  modified_base 5: mod_base = OTHER; note = 2'-O-methyladenosine
  modified_base 6: mod_base = gm
  modified_base 7: mod_base = OTHER; note = 2'-fluoroguanosine
  modified_base 8: mod_base = um
  modified_base 9: mod_base = OTHER; note = 2'-fluoroguanosine
  modified_base 10: mod_base = cm
  modified_base 11: mod_base = OTHER; note = 2'-fluorouridine
  modified_base 12: mod_base = cm
  modified_base 13: mod_base = OTHER; note = 2'-O-methyladenosine
  modified_base 14: mod_base = OTHER; note = 2'-O-methyladenosine
  modified_base 15: mod_base = OTHER; note = 2'-O-methyladenosine
  modified_base 16: mod_base = OTHER; note = 2'-O-methyladenosine
  modified_base 17: mod_base = cm
  modified_base 18: mod_base = OTHER; note = 2'-O-methyladenosine
  modified_base 19: mod_base = um
  modified_base 20: mod_base = cm
  modified_base 21: mod_base = OTHER; note = 2'-O-methyladenosine
  source 1..21: mol_type = other RNA
gagtaggtgctcaaaacatca

SEQ ID NO: 778 - RNA, 21 nt, synthetic construct
  modified_base 1: mod_base = cm
  modified_base 1^2: mod_base = OTHER; note = phosphorothioate linkage
  modified_base 2: mod_base = cm
  modified_base 3: mod_base = um
  modified_base 4: mod_base = gm
  modified_base 5: mod_base = gm
  modified_base 6: mod_base = gm
  modified_base 7: mod_base = OTHER; note = 2'-O-methyladenosine
  modified_base 8: mod_base = OTHER; note = 2'-O-methyladenosine
  modified_base 9: mod_base = OTHER; note = 2'-fluoroguanosine
  modified_base 10: mod_base = OTHER; note = 2'-fluorocytidine
  modified_base 11: mod_base = OTHER; note = 2'-fluorocytidine
  modified_base 12: mod_base = OTHER; note = 2'-O-methyladenosine
  modified_base 13: mod_base = gm
  modified_base 14: mod_base = OTHER; note = 2'-O-methyladenosine
  modified_base 15: mod_base = OTHER; note = 2'-O-methyladenosine
  modified_base 16: mod_base = OTHER; note = 2'-O-methyladenosine
  modified_base 17: mod_base = um
  modified_base 18: mod_base = um
  modified_base 19: mod_base = gm
  modified_base 20: mod_base = um
  modified_base 21: mod_base = OTHER; note = 2'-O-methyladenosine
  source 1..21: mol_type = other RNA
cctgggaagccagaaattgta

SEQ ID NO: 779 - RNA, 21 nt, synthetic construct
  modified_base 1: mod_base = cm
  modified_base 1^2: mod_base = OTHER; note = phosphorothioate linkage
  modified_base 2: mod_base = gm
  modified_base 3: mod_base = gm
  modified_base 4: mod_base = OTHER; note = 2'-O-methyladenosine
  modified_base 5: mod_base = OTHER; note = 2'-O-methyladenosine
  modified_base 6: mod_base = um
  modified_base 7: mod_base = gm
  modified_base 8: mod_base = gm
  modified_base 9: mod_base = OTHER; note = 2'-fluoroadenosine
  modified_base 10: mod_base = OTHER; note = 2'-fluoroadenosine
  modified_base 11: mod_base = OTHER; note = 2'-fluoroadenosine
  modified_base 12: mod_base = cm
  modified_base 13: mod_base = um
  modified_base 14: mod_base = gm
  modified_base 15: mod_base = OTHER; note = 2'-O-methyladenosine
  modified_base 16: mod_base = OTHER; note = 2'-O-methyladenosine
  modified_base 17: mod_base = cm
  modified_base 18: mod_base = OTHER; note = 2'-O-methyladenosine
  modified_base 19: mod_base = cm
  modified_base 20: mod_base = OTHER; note = 2'-O-methyladenosine
  modified_base 21: mod_base = OTHER; note = 2'-O-methyladenosine
  source 1..21: mol_type = other RNA
cggaatggaaactgaacacaa

SEQ ID NO: 780 - RNA, 21 nt, synthetic construct
  source 1..21: mol_type = other RNA
ttgtgttcagtttccattccg

SEQ ID NO: 781 - RNA, 21 nt, synthetic construct
  source 1..21: mol_type = other RNA
tctgtgttcagtttccattcc

SEQ ID NO: 782 - RNA, 21 nt, synthetic construct
  source 1..21: mol_type = other RNA
ttggcttcccaggaatctggt

SEQ ID NO: 783 - RNA, 21 nt, synthetic construct
  source 1..21: mol_type = other RNA
acaatttctggcttcccagga

SEQ ID NO: 784 - RNA, 21 nt, synthetic construct
  source 1..21: mol_type = other RNA
ttacacttcagcaccagtggc

SEQ ID NO: 785 - RNA, 21 nt, synthetic construct
  source 1..21: mol_type = other RNA
taccttccaagcttctgtccg

SEQ ID NO: 786 - RNA, 21 nt, synthetic construct
  source 1..21: mol_type = other RNA
tcggaaaatcccctcatcctg

SEQ ID NO: 787 - RNA, 21 nt, synthetic construct
  source 1..21: mol_type = other RNA
tttctggcttcccaggaatct

SEQ ID NO: 788 - RNA, 21 nt, synthetic construct
  source 1..21: mol_type = other RNA
ttgagttcagaggcagaatct

SEQ ID NO: 789 - RNA, 21 nt, synthetic construct
  source 1..21: mol_type = other RNA
tctaagagtccctgcagggta

SEQ ID NO: 790 - RNA, 21 nt, synthetic construct
  source 1..21: mol_type = other RNA
agctaagagtccctgcagggt

SEQ ID NO: 791 - RNA, 21 nt, synthetic construct
  source 1..21: mol_type = other RNA
aagctacaggagaaggtggga

SEQ ID NO: 792 - RNA, 21 nt, synthetic construct
  source 1..21: mol_type = other RNA
tctgaagctacaggagaaggt

SEQ ID NO: 793 - RNA, 21 nt, synthetic construct
  source 1..21: mol_type = other RNA
tacagactgaggaccagcacc

SEQ ID NO: 794 - RNA, 21 nt, synthetic construct
  source 1..21: mol_type = other RNA
tcacagactgaggaccagcac

SEQ ID NO: 795 - RNA, 21 nt, synthetic construct
  source 1..21: mol_type = other RNA
ttgtgttcagtttccattccc

SEQ ID NO: 796 - RNA, 21 nt, synthetic construct
  source 1..21: mol_type = other RNA
tgatgttttgagcacctactc

SEQ ID NO: 797 - RNA, 21 nt, synthetic construct
  source 1..21: mol_type = other RNA
ttccattcctgttcattgcct

SEQ ID NO: 798 - RNA, 21 nt, synthetic construct
  source 1..21: mol_type = other RNA
tgaatctggtagacacggact

SEQ ID NO: 799 - RNA, 21 nt, synthetic construct
  source 1..21: mol_type = other RNA
taggaatctggtagacacgga

SEQ ID NO: 800 - RNA, 21 nt, synthetic construct
  source 1..21: mol_type = other RNA
taagctacaggagaaggtggg

SEQ ID NO: 801 - RNA, 21 nt, synthetic construct
  source 1..21: mol_type = other RNA
tcatccagtggatttgaggag

SEQ ID NO: 802 - RNA, 21 nt, synthetic construct
  source 1..21: mol_type = other RNA
agttcagaggcagaatctacc

SEQ ID NO: 803 - RNA, 21 nt, synthetic construct
  source 1..21: mol_type = other RNA
tgagttcagaggcagaatcta

SEQ ID NO: 804 - RNA, 21 nt, synthetic construct
  source 1..21: mol_type = other RNA
accttattgggaacaccagcc

SEQ ID NO: 805 - RNA, 21 nt, synthetic construct
  source 1..21: mol_type = other RNA
tcaccttattgggaacaccag

SEQ ID NO: 806 - RNA, 21 nt, synthetic construct
  source 1..21: mol_type = other RNA
tcatccaagtgccagctaagc

SEQ ID NO: 807 - RNA, 21 nt, synthetic construct
  source 1..21: mol_type = other RNA
agatactcccttctcattagg

SEQ ID NO: 808 - RNA, 21 nt, synthetic construct
  source 1..21: mol_type = other RNA
tcacagatactcccttctcac

SEQ ID NO: 809 - RNA, 21 nt, synthetic construct
  source 1..21: mol_type = other RNA
tgttcgatgatgctgatgctg

SEQ ID NO: 810 - RNA, 21 nt, synthetic construct
  source 1..21: mol_type = other RNA
ttgtgttcagtttccattcca

SEQ ID NO: 811 - RNA, 21 nt, synthetic construct
  source 1..21: mol_type = other RNA
tcctttccattcctgttcatc

SEQ ID NO: 812 - RNA, 21 nt, synthetic construct
  source 1..21: mol_type = other RNA
ttagacacggactcggtagtc

SEQ ID NO: 813 - RNA, 21 nt, synthetic construct
  source 1..21: mol_type = other RNA
atactcccttctcattaggca

SEQ ID NO: 814 - RNA, 21 nt, synthetic construct
  source 1..21: mol_type = other RNA
ttccattcctgttcattgccc

SEQ ID NO: 815 - RNA, 21 nt, synthetic construct
  source 1..21: mol_type = other RNA
tgatgttttgagcacctactg

SEQ ID NO: 816 - RNA, 21 nt, synthetic construct
  source 1..21: mol_type = other RNA
tgatgttttgagcacctacta

SEQ ID NO: 817 - RNA, 21 nt, synthetic construct
  source 1..21: mol_type = other RNA
tacaatttctggcttcccagg

SEQ ID NO: 818 - RNA, 21 nt, synthetic construct
  source 1..21: mol_type = other RNA
cggaatggaaactgaacacaa

SEQ ID NO: 819 - RNA, 21 nt, synthetic construct
  modified_base 20: mod_base = i
  source 1..21: mol_type = other RNA
ggaatggaaactgaacacana

SEQ ID NO: 820 - RNA, 21 nt, synthetic construct
  modified_base 17: mod_base = i
  source 1..21: mol_type = other RNA
accagattcctgggaanccaa

SEQ ID NO: 821 - RNA, 21 nt, synthetic construct
  source 1..21: mol_type = other RNA
tcctgggaagccagaaattgt

SEQ ID NO: 822 - RNA, 21 nt, synthetic construct
  source 1..21: mol_type = other RNA
gccactggtgctgaagtgtaa

SEQ ID NO: 823 - RNA, 21 nt, synthetic construct
  modified_base 19: mod_base = i
  source 1..21: mol_type = other RNA
cggacagaagcttggaagnta

SEQ ID NO: 824 - RNA, 21 nt, synthetic construct
  modified_base 20: mod_base = i
  source 1..21: mol_type = other RNA
caggatgaggggattttccna

SEQ ID NO: 825 - RNA, 21 nt, synthetic construct
  source 1..21: mol_type = other RNA
agattcctgggaagctagaaa

SEQ ID NO: 826 - RNA, 21 nt, synthetic construct
  source 1..21: mol_type = other RNA
  modified_base 1: mod_base = OTHER; note = 2-aminoadenine
ngattctgcctctgaactcaa

SEQ ID NO: 827 - RNA, 21 nt, synthetic construct
  source 1..21: mol_type = other RNA
taccctgcagggactcttaga

SEQ ID NO: 828 - RNA, 21 nt, synthetic construct
  modified_base 19: mod_base = i
  source 1..21: mol_type = other RNA
accctgcagggactcttanct

SEQ ID NO: 829 - RNA, 21 nt, synthetic construct
  modified_base 18: mod_base = i
  source 1..21: mol_type = other RNA
tcccaccttctcctgtanctt

SEQ ID NO: 830 - RNA, 21 nt, synthetic construct
  modified_base 20: mod_base = i
  source 1..21: mol_type = other RNA
accttctcctgtagcttcana

SEQ ID NO: 831 - RNA, 21 nt, synthetic construct
  modified_base 19: mod_base = i
  source 1..21: mol_type = other RNA
ggtgctggtcctcagtctnta

SEQ ID NO: 832 - RNA, 21 nt, synthetic construct
  source 1..21: mol_type = other RNA
ggtgctggtcctcagtctgta

SEQ ID NO: 833 - RNA, 21 nt, synthetic construct
  modified_base 20: mod_base = i
  source 1..21: mol_type = other RNA
gtgctggtcctcagtctgtna

SEQ ID NO: 834 - RNA, 21 nt, synthetic construct
  modified_base 18: mod_base = i
  source 1..21: mol_type = other RNA
gtgctggtcctcagtctntga

SEQ ID NO: 835 - RNA, 21 nt, synthetic construct
  source 1..21: mol_type = other RNA
gggaatggaaactgaacacaa

SEQ ID NO: 836 - RNA, 21 nt, synthetic construct
  modified_base 14: mod_base = i
  source 1..21: mol_type = other RNA
cggaatggaaactnaacacaa

SEQ ID NO: 837 - RNA, 21 nt, synthetic construct
  source 1..21: mol_type = other RNA
cggaatggaaactgaatacaa

SEQ ID NO: 838 - RNA, 21 nt, synthetic construct
  source 1..21: mol_type = other RNA
gagtaggtgctcaaaacatca

SEQ ID NO: 839 - RNA, 21 nt, synthetic construct
  modified_base 18: mod_base = i
  source 1..21: mol_type = other RNA
aggcaatgaacaggaatngaa

SEQ ID NO: 840 - RNA, 21 nt, synthetic construct
  modified_base 16: mod_base = i
  source 1..21: mol_type = other RNA
agtccgtgtctaccanattca

SEQ ID NO: 841 - RNA, 21 nt, synthetic construct
  source 1..21: mol_type = other RNA
tccgtgtctaccagattccta

SEQ ID NO: 842 - RNA, 21 nt, synthetic construct
  modified_base 17: mod_base = i
  source 1..21: mol_type = other RNA
cccaccttctcctgtanctta

SEQ ID NO: 843 - RNA, 21 nt, synthetic construct
  modified_base 16: mod_base = i
  source 1..21: mol_type = other RNA
ctcctcaaatccactngatga

SEQ ID NO: 844 - RNA, 21 nt, synthetic construct
  modified_base 17: mod_base = i
  source 1..21: mol_type = other RNA
ggtagattctgcctctnaact

SEQ ID NO: 845 - RNA, 21 nt, synthetic construct
  source 1..21: mol_type = other RNA
tagattctgcctctgaactca

SEQ ID NO: 846 - RNA, 21 nt, synthetic construct
  source 1..21: mol_type = other RNA
ggctggtgttcccaataaggt

SEQ ID NO: 847 - RNA, 21 nt, synthetic construct
  modified_base 18: mod_base = i
  source 1..21: mol_type = other RNA
ctggtgttcccaataagntga

SEQ ID NO: 848 - RNA, 21 nt, synthetic construct
  modified_base 16: mod_base = i
  source 1..21: mol_type = other RNA
gcttagctggcacttngatga

SEQ ID NO: 849 - RNA, 21 nt, synthetic construct
  modified_base 16: mod_base = i
  source 1..21: mol_type = other RNA
cctaatgagaagggantatct

SEQ ID NO: 850 - RNA, 21 nt, synthetic construct
  modified_base 18: mod_base = i
  source 1..21: mol_type = other RNA
gtgagaagggagtatctntga

SEQ ID NO: 851 - RNA, 21 nt, synthetic construct
  modified_base 17: mod_base = i
  source 1..21: mol_type = other RNA
cagcatcagcatcatcnaaca

SEQ ID NO: 852 - RNA, 21 nt, synthetic construct
  source 1..21: mol_type = other RNA
tggaatggaaactgaacacaa

SEQ ID NO: 853 - RNA, 21 nt, synthetic construct
  source 1..21: mol_type = other RNA
gatgaacaggaatggaaagga

SEQ ID NO: 854 - RNA, 21 nt, synthetic construct
  modified_base 20: mod_base = i
  source 1..21: mol_type = other RNA
gatgaacaggaatggaaagna

SEQ ID NO: 855 - RNA, 21 nt, synthetic construct
  source 1..21: mol_type = other RNA
gactaccgagtccgtgtctaa

SEQ ID NO: 856 - RNA, 21 nt, synthetic construct
  source 1..21: mol_type = other RNA
tgcctaatgagaagggagtat

SEQ ID NO: 857 - RNA, 21 nt, synthetic construct
  modified_base 7: mod_base = i
  source 1..21: mol_type = other RNA
gagtagntgctcaaaacatca

SEQ ID NO: 858 - RNA, 21 nt, synthetic construct
  source 1..21: mol_type = other RNA
aggcaatgaacaggaatggaa

SEQ ID NO: 859 - RNA, 21 nt, synthetic construct
  modified_base 19: mod_base = i
  source 1..21: mol_type = other RNA
aggcaatgaacaggaatgnaa

SEQ ID NO: 860 - RNA, 21 nt, synthetic construct
  modified_base 14: mod_base = i
  source 1..21: mol_type = other RNA
aggcaatgaacagnaatggaa

SEQ ID NO: 861 - RNA, 21 nt, synthetic construct
  modified_base 13: mod_base = i
  source 1..21: mol_type = other RNA
aggcaatgaacangaatggaa

SEQ ID NO: 862 - RNA, 21 nt, synthetic construct
  modified_base 18: mod_base = i
  source 1..21: mol_type = other RNA
gggcaatgaacaggaatngaa

SEQ ID NO: 863 - RNA, 21 nt, synthetic construct
  source 1..21: mol_type = other RNA
cagtaggtgctcaaaacatca

SEQ ID NO: 864 - RNA, 21 nt, synthetic construct
  source 1..21: mol_type = other RNA
  modified_base 2: mod_base = OTHER; note = 2-aminoadenine
tngtaggtgctcaaaacatca

SEQ ID NO: 865 - RNA, 21 nt, synthetic construct
  source 1..21: mol_type = other RNA
cctgggaagccagaaattgta

SEQ ID NO: 866 - RNA, 21 nt, synthetic construct
  source 1..21: mol_type = other RNA
  modified_base 10: mod_base = OTHER; note = 2-aminoadenine
  modified_base 14: mod_base = i
cggaatgganactnaacacaa

SEQ ID NO: 867 - RNA, 21 nt, synthetic construct
  source 1..21: mol_type = other RNA
  modified_base 10: mod_base = OTHER; note = 2-aminoadenine
cggaatgganactgaacacaa
